(19) United States
(12) Patent Application Publication
(10) Pub. No.: US 2011/0177070 A1
(43) Pub. Date: Jul. 21, 2011

(54) TGF-Beta Antagonist Multi-Target Binding Proteins

(75) Inventors: Alan Keith Lofquist, Kirkland, WA (US); Peter Robert Baum, Seattle, WA (US); Peter Armstrong Thompson, Bellevue, WA (US); Lynda Misher, Seattle, WA (US)

(73) Assignee: Emergent Product Development Seatlle, LLC

(21) Appl. No.: 13/001,088

(22) PCT Filed: Jul. 2, 2009
(86) PCT No.: PCT/US2009/049616

§ 371 Date: Mar. 3, 2011

Related U.S. Application Data
(60) Provisional application No. 61/134,091, filed on Jul. 2, 2008.
(60) Provisional application No. 61/134,090, filed on Jul. 2, 2008.
(60) Provisional application No. 61/134,089, filed on Jul. 2, 2008.
(60) Provisional application No. 61/134,088, filed on Jul. 2, 2008.
(60) Provisional application No. 61/134,085, filed on Jul. 2, 2008.
(60) Provisional application No. 61/134,087, filed on Jul. 2, 2008.
(60) Provisional application No. 61/134,086, filed on Jul. 2, 2008.
(60) Provisional application No. 61/181,232, filed on May 26, 2009.

(51) Int. Cl. A61K 39/395; C07K 16/46; C07H 21/04; C12N 15/63; C12N 5/10; A61P 35/00; C12P 21/04; A61P 19/02

(52) U.S. Cl. 424/134.1; 530/387.3; 536/23.4; 435/320.1; 435/369; 435/69.6

(57) ABSTRACT

This disclosure provides a multi-target fusion protein composed of a TGF? antagonist domain and another binding domain antagonistic for a heterologous target (such as IL6, IL10, VEGF, TNF, HGF, TWEAK, IGF) or agonistic for a heterologous target (such as GITR). The multi-specific fusion protein may also include an intervening domain that separates the binding domains and allows for dimerization. This disclosure also provides polynucleotides encoding the multi-specific fusion proteins, compositions of the fusion proteins, and methods of using the multi-specific fusion proteins and compositions.

### TECHNICAL FIELD

[0001] This disclosure relates generally to the field of multi-target binding molecules and therapeutic applications thereof and more specifically to a fusion protein composed of either a transforming growth factor-beta (TGFβ) antagonist domain and another binding domain antagonistic for a heterologous target, such as IL6, IL10, VEGF, TNF, HGF, TWEAK, IGF1 or IGF2, or a TGFβ antagonist domain and another binding domain agonistic for a heterologous target, such as GITR, as well as compositions and therapeutic uses thereof.

### BACKGROUND

[0002] Transforming growth factor-beta (TGFβ) is a potent cytokine that has significant effects on the immune system. The main function of TGFβ in the immune system is to maintain tolerance and initial immune responses against foreign pathogens. Three isoforms of TGFβ have been identified in mammals, TGFβ1, TGFβ2 and TGFβ3, with TGFβ1 being the predominant isoform. TGFβ is secreted in a latent form and only a small percentage of total secreted TGFβ is activated under physiological conditions. The biological effects of TGFβ occur mostly through binding of TGFβ to the receptors ALK5 and TGFβ receptor II (TGFβR2). Specifically, active TGFβ dimer binds to a tetrameric ALK5 and TGFβR2 complex to initiate cell signaling. ALK5 is not required for the initial binding of TGFβ, but is required for signaling.

[0003] TGFβ has been shown to influence many cellular functions such as cell proliferation, differentiation, cell-cell and cell-matrix adhesion, cell motility and activation of lymphocytes. (For a review of the role of TGFβ in regulating immune responses, see Li et al. (2006) Annu Rev. Immunol. 24:99-146.) Furthermore, TGFβ is believed to induce or mediate the progression of many diseases such as osteoporosis, hypertension, atherosclerosis, hepatic cirrhosis and fibrotic diseases of the kidney, liver and lungs, and tumor progression. TGFβ can augment end-organ damage caused by chronic inflammation and TGFβ antagonists have been shown to be effective in attenuating this damage in animal models of diseases such as diabetic kidney disease, glomerulonephritis, cyclosporine-mediated renal injury and systemic lupus erythematosus (SLE) (Border et al. (1990) Nature 346:371-374; Border et al. (1992) Nature 360:361-364; Isaka et al. (1999) Kidney Int. 55:465-475; Sharma et al. (1996) Diabetes 45:522; Xin et al. (2004) Transplantation 15:1433; Benigni et al. (2003) J. Am. Soc. Nephrol. 14:1816). With respect to cancer, TGFβ can have a direct inhibitory activity on malignant cells and can augment the production or activity of a range of tumor growth factors and angiogenic factors.

[0004] While TGFβ knock-out mice have severe pathology related to unrestrained inflammation and autoimmunity, administration of TGFβ antagonists is well tolerated in mice and humans (Rusek et al. (2003) Immunopharmacol. Immunotoxicol. 25:235-57; Denton et al. (2007) Arthritis Rheum. 56:323-33). Methods of treatment using TGF antagonists known in the art include use of antibodies against TGFβ, use of TGFβR2 ectodomain Ig fusion proteins, and use of small molecule inhibitors of TGFβ1 kinase activity. All of these methods have modest beneficial impact in rodent models of disease or in clinical trials in humans (Denton et al. (2007) Arthritis Rheum. 56:323). Indeed, chronic use of a TGFβ antagonist in mice shows no evidence of activation of the immune system as might be expected from the phenotype of TGFβ−/− knock-out mice. This is likely to reflect, in part, the complex nature of the biology of cytokines, interleukins, chemokines and growth factors in human diseases and the requirement to inhibit more than one pathway simultaneously to maximize the benefit to patients.

### BRIEF DESCRIPTION OF THE FIGURES

[0005] FIGS. 1A-1C show that multi-specific (Xceptor) fusion proteins containing one of various different Hyper-IL6 binding domains fused to a TNFR ectodomain bind to Hyper-IL6 specifically as measured by ELISA, and that these multi-specific fusion proteins preferentially bind Hyper-IL6 over IL6 and IL6R alone. Only two fusion proteins tested bound IL6 and none bound sIL6R.

[0006] FIG. 2 shows that multi-specific fusion proteins containing a TNFR ectodomain fused to one of various different Hyper-IL6 binding domains bind to TNF-α as measured by ELISA.

[0007] FIG. 3 shows that multi-specific fusion proteins containing one of various different Hyper-IL6 binding domains fused to a TNFR ectodomain can simultaneously bind to Hyper-IL6 and TNF-α as measured by ELISA.

[0008] FIG. 4 shows that multi-specific fusion proteins containing one of various different Hyper-IL6 binding domains fused to a TNFR ectodomain block gp130 from binding to Hyper-IL6 as measured by ELISA.

[0009] FIGS. 5A and 5B show that multi-specific fusion proteins containing one of various different Hyper-IL6 binding domains fused to a TNFR ectodomain block (A) IL6 or (B) Hyper-IL6 induced proliferation of TF-1 cells.

[0010] FIG. 6 shows that multi-specific fusion proteins containing one of various different Hyper-IL6 binding domains fused to a TNFR ectodomain block TNF-α from binding to TNFR as measured by ELISA.

[0011] FIG. 7 shows that multi-specific fusion proteins containing a TNFR ectodomain fused to one of various different Hyper-IL6 binding domains block TNF-α induced killing of L929 cells.

[0012] FIG. 8 shows that multi-specific fusion proteins containing a TGFβR2 ectodomain fused to one of various different Hyper-IL6 binding domains bind to TGFβ1 as measured by ELISA.

[0013] FIG. 9 shows that multi-specific fusion proteins containing a TNFR ectodomain fused to a TGFβRII ectodomain block TGFβ-1 induced inhibition of IL-4 proliferation of HT2 cells.

[0014] FIG. 10 shows that multi-specific fusion proteins containing a TNFR ectodomain fused to an IL6 binding domain did not bind to HepG2 (liver) cells.

[0015] FIG. 11 shows that multi-specific fusion proteins containing a TNFR ectodomain fused to an IL6 binding domain blocked the HIL6-induced SAA response in mice.

[0016] FIG. 12 shows that multi-specific fusion proteins containing a TNFR ectodomain fused to an IL6 binding domain blocked the HIL6-induced sgp130 response in mice.

[0017] FIGS. 13A and B show the results of studies on the ability of multi-specific fusion proteins containing a TNFR ectodomain fused to an IL6 binding domain to block the TNFα-induced SAA response in mice, at 2 hours and 24 hours post-administration, respectively.

### DETAILED DESCRIPTION

[0018] The present disclosure provides multi-specific fusion proteins, referred to herein as Xceptor molecules. Exemplary structures of such multi-specific fusion proteins, include N-BD-ID-ED-C, N-ED-ID-BD-C, and N-ED1-ID-ED2-C, wherein N- and -C represent the amino- and carboxy-terminus, respectively, BD is an immunoglobulin-like or immunoglobulin variable region binding domain, ID is an intervening domain, and ED is an ectodomain (e.g. an extracellular domain), such as a receptor ligand binding domain, cysteine rich domain (A domain; see WO 02/088171 and WO 04/044011), semaphorin or semaphorin-like domain, or the like. In some constructs, the ID can comprise an immunoglobulin constant region or sub-region disposed between the first and second binding domains. In still further constructs, the BD and ED are each linked to the ID via the same or different linker (e.g., a linker comprising one to 50 amino acids), such as an immunoglobulin hinge region (made up of, for example, the upper and core regions) or functional variant thereof, or a lectin interdomain region or functional variant thereof, or a cluster of differentiation (CD) molecule stalk region or functional variant thereof.

[0019] Prior to setting forth this disclosure in more detail, it may be helpful to an understanding thereof to provide definitions of certain terms to be used herein. Additional definitions are set forth throughout this disclosure.

[0020] In the present description, any concentration range, percentage range, ratio range, or integer range is to be understood to include the value of any integer within the recited range and, when appropriate, fractions thereof (such as one tenth and one hundredth of an integer), unless otherwise indicated. Also, any number range recited herein relating to any physical feature, such as polymer subunits, size or thickness, are to be understood to include any integer within the recited range, unless otherwise indicated. As used herein, “about” or “consisting essentially of” mean±20% of the indicated range, value, or structure, unless otherwise indicated. It should be understood that the terms “a” and “an” as used herein refer to “one or more” of the enumerated components. The use of the alternative (e.g., “or”) should be understood to mean either one, both, or any combination thereof of the alternatives. As used herein, the terms “include” and “comprise” are used synonymously. In addition, it should be understood that the individual compounds, or groups of compounds, derived from the various combinations of the structures and substituents described herein, are disclosed by the present application to the same extent as if each compound or group of compounds was set forth individually. Thus, selection of particular structures or particular substituents is within the scope of the present disclosure.

[0021] A “binding domain” or “binding region” according to the present disclosure may be, for example, any protein, polypeptide, oligopeptide, or peptide that possesses the ability to specifically recognize and bind to a biological molecule (e.g., TGFβ or IL6) or complex of more than one of the same or different molecule or assembly or aggregate, whether stable or transient (e.g., IL6/IL6R complex). Such biological molecules include proteins, polypeptides, oligopeptides, peptides, amino acids, or derivatives thereof, lipids, fatty acids, or derivatives thereof; carbohydrates, saccharides, or derivatives thereof; nucleotides, nucleosides, peptide nucleic acids, nucleic acid molecules, or derivatives thereof; glycoproteins, glycopeptides, glycolipids, lipoproteins, proteolipids, or derivatives thereof; other biological molecules that may be present in, for example, a biological sample; or any combination thereof. A binding region includes any naturally occurring, synthetic, semi-synthetic, or recombinantly produced binding partner for a biological molecule or other target of interest. A variety of assays are known for identifying binding domains of the present disclosure that specifically bind with a particular target, including Western blot, ELISA, or Biacore analysis.

[0022] Binding domains and fusion proteins thereof of this disclosure can be capable of binding to a desired degree, including “specifically or selectively binding” a target while not significantly binding other components present in a test sample, if they bind a target molecule with an affinity or Kₐ (i.e., an equilibrium association constant of a particular binding interaction with units of 1/M) of, for example, greater than or equal to about 10⁵ M⁻¹, 10⁶ M⁻¹, 10⁷ M⁻¹, 10⁸ M⁻¹, 10⁹ M⁻¹, 10¹⁰ M⁻¹, 10¹¹ M⁻¹, 10¹² M⁻¹, or 10¹³ M⁻¹. “High affinity” binding domains refers to those binding domains with a Kₐ of at least 10⁷ M⁻¹, at least 10⁸ M⁻¹, at least 10⁹ M⁻¹, at least 10¹⁰ M⁻¹, at least 10¹¹ M⁻¹, at least 10¹² M⁻¹, at least 10¹³ M⁻¹, or greater. Alternatively, affinity may be defined as an equilibrium dissociation constant (K_{d}) of a particular binding interaction with units of M (e.g., 10⁻⁵ M to 10⁻¹³ M). Affinities of binding domain polypeptides and fusion proteins according to the present disclosure can be readily determined using conventional techniques (see, e.g., Scatchard et al. (1949) Ann. N.Y. Acad. Sci. 51:660; and U.S. Pat. Nos. 5,283,173; 5,468,614; Biacore® analysis; or the equivalent).

[0023] Binding domains of this disclosure can be generated as described herein or by a variety of methods known in the art (see, e.g., U.S. Pat. Nos. 6,291,161; 6,291,158). Sources include antibody gene sequences from various species (which can be formatted as antibodies, sFvs, scFvs or Fabs, such as in a phage library), including human, camelid (from camels, dromedaries, or llamas; Hamers-Casterman et al. (1993) Nature, 363:446 and Nguyen et al. (1998) J. Mol. Biol., 275:413), shark (Roux et al. (1998) Proc. Nat'l. Acad. Sci. (USA) 95:11804), fish (Nguyen et al. (2002) Immunogenetics, 54:39), rodent, avian, ovine, sequences that encode random peptide libraries or sequences that encode an engineered diversity of amino acids in loop regions of alternative non-antibody scaffolds, such as fibrinogen domains (see, e.g., Weisel et al. (1985) Science 230:1388), Kunitz domains (see, e.g., U.S. Pat. No. 6,423,498), lipocalin domains (see, e.g., WO 2006/095164), V-like domains (see, e.g., US Patent Application Publication No. 2007/0065431), C-type lectin domains (Zelensky and Gready (2005) FEBS J. 272:6179), mAb² or Fcab™ (see, e.g., PCT Patent Application Publication Nos. WO 2007/098934; WO 2006/072620), or the like. Additionally, traditional strategies for hybridoma development using a synthetic single chain IL6/IL6R complex, such as a human IL6/IL6R complex or Hyper-IL6 (IL6 joined by a peptide linker to IL6R), as an immunogen in convenient systems (e.g., mice, HuMAb Mouse®, TC Mouse™, KM-Mouse®, llamas, chicken, rats, hamsters, rabbits, etc.) can be used to develop binding domains of this disclosure.

[0024] Terms understood by those in the art as referring to antibody technology are each given the meaning acquired in the art, unless expressly defined herein. For example, the terms “V_{L}” and “V_{H}” refer to the variable binding region derived from an antibody light and heavy chain, respectively. The variable binding regions are made up of discrete, well-defined sub-regions known as “complementarity determining regions” (CDRs) and “framework regions” (FRs). The terms “C_{L}” and “C_{H}” refer to an “immunoglobulin constant region,” i.e., a constant region derived from an antibody light or heavy chain, respectively, with the latter region understood to be further divisible into C_{H1}, C_{H2}, C_{H3} and C_{H4} constant region domains, depending on the antibody isotype (IgA, IgD, IgE, IgG, IgM) from which the region was derived. A portion of the constant region domains makes up the Fc region (the “fragment crystallizable” region), which contains domains responsible for the effector functions of an immunoglobulin, such as ADCC (antibody-dependent cell-mediated cytotoxicity), ADCP (antibody-dependent cell-mediated phagocytosis), CDC (complement-dependent cytotoxicity) and complement fixation, binding to Fc receptors, greater half-life in vivo relative to a polypeptide lacking an Fc region, protein A binding, and perhaps even placental transfer (see Capon et al. (1989) Nature, 337:525). Further, a polypeptide containing an Fc region allows for dimerization or multimerization of the polypeptide. A “hinge region,” also referred to herein as a “linker,” is an amino acid sequence interposed between and connecting the variable binding and constant regions of a single chain of an antibody, which is known in the art as providing flexibility in the form of a hinge to antibodies or antibody-like molecules.

[0025] The domain structure of immunoglobulins is amenable to engineering, in that the antigen binding domains and the domains conferring effector functions may be exchanged between immunoglobulin classes and subclasses. Immunoglobulin structure and function are reviewed, for example, in Harlow et al., Eds., Antibodies: A Laboratory Manual, Chapter 14 (Cold Spring Harbor Laboratory, Cold Spring Harbor, 1988). An extensive introduction as well as detailed information about all aspects of recombinant antibody technology can be found in the textbook Recombinant Antibodies (John Wiley & Sons, NY, 1999). A comprehensive collection of detailed antibody engineering lab Protocols can be found in R. Kontermann and S. Dübel, Eds., The Antibody Engineering Lab Manual (Springer Verlag, Heidelberg/New York, 2000).

[0026] “Derivative” as used herein refers to a chemically or biologically modified version of a compound that is structurally similar to a parent compound and (actually or theoretically) derivable from that parent compound. Generally, a “derivative” differs from an “analogue” in that a parent compound may be the starting material to generate a “derivative,” whereas the parent compound may not necessarily be used as the starting material to generate an “analogue.” An analogue may have different chemical or physical properties of the parent compound. For example, a derivative may be more hydrophilic or it may have altered reactivity (e.g., a CDR having an amino acid change that alters its affinity for a target) as compared to the parent compound.

[0027] The term “biological sample” includes a blood sample, biopsy specimen, tissue explant, organ culture, biological fluid or any other tissue or cell or other preparation from a subject or a biological source. A subject or biological source may, for example, be a human or non-human animal, a primary cell culture or culture adapted cell line including genetically engineered cell lines that may contain chromosomally integrated or episomal recombinant nucleic acid sequences, somatic cell hybrid cell lines, immortalized or immortalizable cell lines, differentiated or differentiatable cell lines, transformed cell lines, or the like. In further embodiments of this disclosure, a subject or biological source may be suspected of having or being at risk for having a disease, disorder or condition, including a malignant disease, disorder or condition or a B cell disorder. In certain embodiments, a subject or biological source may be suspected of having or being at risk for having a hyperproliferative, inflammatory, or autoimmune disease, and in certain other embodiments of this disclosure the subject or biological source may be known to be free of a risk or presence of such disease, disorder, or condition.

[0028] In certain embodiments, the present disclosure makes possible the depletion or modulation of cells associated with aberrant TGFβ activity by providing multi-specific fusion proteins that bind both a TGFβ and a second target other than TGFβ, such as IL6, IL6R, an IL6/IL6R complex, IL10, GITR, VEGF, TNF, HGF, Tumor necrosis factor-like weak inducer of apoptosis (TWEAK; also known as tumor necrosis factor (ligand) superfamily, member 12, TNFSF12), IGF1 or IGF2. In certain embodiments, a multi-specific fusion protein comprises a first and second binding domain, a first and second linker, and an intervening domain, wherein one end of the intervening domain is fused via a linker to a first binding domain that is a TGFβ2 ectodomain (e.g. an extracellular domain) and at the other end fused via a linker to a second binding domain. In some embodiments, less than an entire TGFβ2 ectodomain is employed. Specifically, domains within the ectodomain that function as a TGFβ antagonist or confer ligand binding are employed.

[0029] In certain embodiments, the second binding domain is an IL6 antagonist (such as an immunoglobulin variable region that is specific for an IL6, IL6R, or IL6/IL6Ra complex), an IL10 antagonist (such as an immunoglobulin variable region that is specific for IL10, an IL10R1 ectodomain (e.g. SEQ ID NO:745) or a sub-domain of an IL10R1 ectodomain), a GITR agonist (such as an immunoglobulin variable region that is specific for GITR, a GITRL ectodomain (for example, amino acids 74-181 of Genbank Accession NP_{—}005083.2, SEQ ID NO:746) or a sub-domain of a GITRL ectodomain), a VEGF antagonist (such as an immunoglobulin variable region that is specific for VEGF, a VEGFR2 ectodomain (see, Genbank Accession NP_{—}002244.1, SEQ ID NO:747) or a sub-domain of a VEGFR2 ectodomain), a TNF antagonist (such as an immunoglobulin variable region that is specific for TNF, a TNFR1 ectodomain (see, Genbank Accession NP_{—}001056.1; SEQ ID NO:749), a sub-domain of a TNFR1 ectodomain, a TNFR2 ectodomain (see, Genbank Accession NP_{—}001057.1; SEQ ID NO:748), or a sub-domain of a TNFR2 ectodomain), a HGF antagonist (such as an immunoglobulin variable region that is specific for HGF, a c-Met ectodomain or a sub-domain of a c-Met ectodomain (e.g. SEQ ID NO:750-752)), a TWEAK antagonist (such as an immunoglobulin binding domain specific for TWEAK or TWEAKR, or a TWEAKR ectodomain (e.g. SEQ ID NO:761) or TWEAK binding fragment thereof), or an IGF1 or IGF2 antagonist (such as an immunoglobulin variable region that is specific for IGF1 or IGF2, an IGF1R ectodomain (for example, an IGF1R ectodomain of Genbank Accession no. NP_{—}000866.1 (SEQ ID NO:753) or a sub-domain thereof), or an IGFBP (for example, an IGFBP ectodomain of Genbank Accession no. NP_{—}000587.1 (IGFBP1; SEQ ID NO:754), NP_{—}000588.2 (IGFBP2; SEQ ID NO:755), NP_{—}001013416.1 (IGFBP3 isoform a; SEQ ID NO:756), NP_{—}000589.2 (IGFBP3 isoform b; SEQ ID NO:757), NP_{—}001543.2 (IGFBP4; SEQ ID NO:758), NP_{—}000590.1 (IGFBP5; SEQ ID NO:759) or NP_{—}002169.1 (IGFBP6; SEQ ID NO:760)), or a sub-domain thereof).

[0030] The complex of IL6 with membrane or soluble IL6 receptor (IL6Rα) is referred to herein as IL6xR when referring to IL6 with either membrane IL6Rα or soluble IL6Rα (sIL6Rα), and as sIL6xR when referring only to the complex of IL6 with sIL6Rα. In some embodiments, multi-specific fusion proteins containing a binding domain specific for IL6xR have one or more of the following properties: (1) greater or equal affinity for an IL6xR complex than for IL6 or IL6Rα alone or has greater affinity for IL6Rα alone or an IL6xR complex than for IL6 alone; (2) compete with membrane gp130 for binding with a sIL6xR complex or enhance soluble gp130 binding with a sIL6xR complex; (3) preferentially inhibit IL6 trans-signaling over IL6 cis-signaling and (4) do not inhibit signaling of gp130 family cytokines other than IL6.

### TGFβ Antagonists

[0031] As outlined above, TGFβ has been linked to several diseases such as fibrosis, auto-immunity and cancer. In the early stages of tumor development, TGFβ acts as a growth inhibitory factor. However, as tumors evolve they develop mechanisms to evade the growth-inhibition properties of TGFβ, resulting in increased tumor invasiveness, increased metastatic potential and inhibition of surrounding immune responses (Luwor et al. (2008) J. Clin. Neurosci. June 10 (epub)). A TGFβ antagonist of this disclosure inhibits the tumor-promoting activity of TGF. The antagonist domains may block TGFβ dimerization and TGFβ binding, or the domains may bind to components of the receptor system and block activity either by preventing ligand activity or by preventing the assembly of the receptor complex.

[0032] In some embodiments, a TGFβ antagonist may be an extracellular domain (“ectodomain”) of TGFβR2. In certain embodiments, a TGFβ antagonist comprises a TGFβR2 ectodomain as set forth in SEQ ID NO:743, 744 or any combination thereof.

[0033] In one aspect, a TGFβ antagonist or fusion protein thereof of this disclosure is specific for TGFβ wherein it has an affinity with a dissociation constant (K_{d}) of about 10⁻⁵ M to 10⁻¹³ M, or less. In certain embodiments, the TGFβ antagonist or fusion protein thereof binds TGFβ with an affinity that is less than about 300 pM. Another measure, the kinetic dissociation (k_{d}), also referred to herein as k_{OFF}, is a measure of the rate of complex dissociation and, thus, the ‘dwell time’ of the target molecule bound by a polypeptide binding domain of this disclosure. The k_{d} (k_{OFF}) has units of 1/sec. Exemplary TGFβ antagonists of this disclosure can have a k_{OFF} of about 10⁻⁴/sec (e.g., about a day) to about 10⁻⁸/sec or less. In certain embodiments, the k_{OFF} can range from about 10⁻¹/sec, about 10⁻²/sec, about 10⁻³/sec, about 10⁻⁴/sec, about 10⁻⁵/sec, about 10⁻⁶/sec, about 10⁻⁷/sec, about 10⁻⁸/sec, about 10⁻⁹/sec, about 10⁻¹°/sec, or less (see Graff et al. (2004) Protein Eng. Des. Sel. 17:293). In some embodiments, a TGFβ antagonist or fusion protein thereof of this disclosure will bind TGFβ with higher affinity and have a lower k_{OFF} rate as compared to the cognate TGFβ receptor binding to TGFβ. In further embodiments, a TGFβ antagonist or fusion protein thereof of this disclosure that blocks or alters TGFβ dimerization or other cell surface activity may have a more moderate affinity (i.e., a K_{d} of about 10⁻⁸ M to about 10⁻⁹ M) and a more moderate off rate (i.e., a k_{OFF} closer to about 10⁻⁴/sec) as compared to the affinity and dimerization rate of cognate TGFβ receptor.

[0034] Exemplary binding domains that function as TGFβ antagonists of this disclosure can be generated as described herein or by a variety of methods known in the art (see, e.g., U.S. Pat. Nos. 6,291,161; 6,291,158). Sources include antibody gene sequences from various species (which can be formatted as scFvs or Fabs, such as in a phage library), including human, camelid (from camels, dromedaries, or llamas; Hamers-Casterman et al. (1993) Nature, 363:446 and Nguyen et al. (1998) J. Mol. Biol., 275:413), shark (Roux et al. (1998) Proc. Nat'l. Acad. Sci. (USA) 95:11804), fish (Nguyen et al. (2002) Immunogenetics, 54:39), rodent, avian, ovine, sequences that encode random peptide libraries or sequences that encode an engineered diversity of amino acids in loop regions of alternative non-antibody scaffolds, such as fibrinogen domains (see, e.g., Weisel et al. (1985) Science 230:1388), Kunitz domains (see, e.g., U.S. Pat. No. 6,423,498), lipocalin domains (see, e.g., WO 2006/095164), V-like domains (see, e.g., US Patent Application Publication No. 2007/0065431), C-type lectin domains (Zelensky and Gready (2005) FEBS J. 272:6179), or the like. Additionally, traditional strategies for hybridoma development using a synthetic TGFβ or single chain TGFβR2 ectodomain as an immunogen in convenient systems (e.g., mice, HuMAb Mouse®, TC Mouse™, KM-Mouse®, llamas, chicken, rats, hamsters, rabbits, etc.) can be used to develop binding domains of this disclosure.

[0035] In an illustrative example, TGFβ antagonists of this disclosure specific for a TGFβ can be identified using a Fab phage library of fragments (see, e.g., Hoet et al. (2005) Nature Biotechnol. 23:344) by screening for binding to a synthetic or recombinant TGFβ (using an amino acid sequence or fragment thereof as set forth in GenBank Accession No. NP_{—}000651.3). A TGFβ, as described herein or known in the art, can be used for such a screening. In certain embodiments, a TGFβ used to generate a TGFβ antagonist can further comprise an intervening domain or a dimerization domain, as described herein, such as an immunoglobulin Fc domain or fragment thereof.

[0036] In some embodiments, TGFβ antagonist domains of this disclosure comprise V_{H} and V_{L} domains as described herein. In certain embodiments, the V_{H} and V_{L} domains are rodent (e.g., mouse, rat), humanized, or human. In further embodiments, there are provided TGFβ antagonist domains of this disclosure that have a sequence that is at least 90%, at least 91%, at least 92%, at least 93%, at least 94%, at least 95%, at least 96%, at least 97%, at least 98%, at least 99%, at least 99.5%, or at least 100% identical to the amino acid sequence of one or more light chain variable regions (V_{L}) or to one or more heavy chain variable regions (V_{H}), or both, wherein each CDr has up to three amino acid changes (i.e., many of the changes are in the framework region(s)), as set forth herein.

[0037] In further embodiments, TGFβ antagonist domains of this disclosure comprise V_{H} and V_{L} domains as set forth herein, which are at least 80%, at least 81%, at least 82%, at least 83%, at least 84%, at least 85%, at least 86%, at least 87%, at least 88%, at least 89%, at least 90%, at least 91%, at least 92%, at least 93%, at least 94%, at least 95%, at least 96%, at least 97%, at least 98%, at least 99%, or at least 99.5% identical to the amino acid sequence of such V_{H} domain, V_{L} domain, or both wherein each CDr has at most up to three amino acid changes (i.e., many of the changes are in the framework region(s)).

[0038] The terms “identical” or “percent identity,” in the context of two or more polypeptide or nucleic acid molecule sequences, means two or more sequences or subsequences that are the same or have a specified percentage of amino acid residues or nucleotides that are the same over a specified region (e.g., 60%, 65%, 70%, 75%, 80%, 85%, 90%, 91%, 92%, 93%, 94%, 95%, 96%, 97%, 98%, 99%, or 100% identity), when compared and aligned for maximum correspondence over a comparison window, or designated region, as measured using methods known in the art, such as a sequence comparison algorithm, by manual alignment, or by visual inspection. For example, preferred algorithms suitable for determining percent sequence identity and sequence similarity are the BLAST and BLAST 2.0 algorithms, which are described in Altschul et al. (1977) Nucleic Acids Res. 25:3389 and Altschul et al. (1990) J. Mol. Biol. 215:403, respectively.

[0039] In any of these or other embodiments described herein, the V_{L} and V_{H} domains may be arranged in either orientation and may be separated by about a five to about a thirty amino acid linker as disclosed herein or any other amino acid sequence capable of providing a spacer function compatible with interaction of the two sub-binding domains. In certain embodiments, a linker joining the V_{H} and V_{L} domains comprises an amino acid sequence as set forth in SEQ ID NO:497-604 and 1223-1228, such as Linker 47 (SEQ ID NO:543) or Linker 80 (SEQ ID NO:576). Multi-specific binding domains will have at least two specific sub-binding domains, by analogy to camelid antibody organization, or at least four specific sub-binding domains, by analogy to the more conventional mammalian antibody organization of paired V_{H} and V_{L} chains.

[0040] In further embodiments, TGFβ antagonist domains and fusion proteins thereof of this disclosure may comprise a binding domain including one or more complementarity determining region (“CDR”), or multiple copies of one or more such CDRs, which have been obtained, derived, or designed from variable regions of an anti-TGFβ or anti-TGFβR2 scFv or Fab fragment or from heavy or light chain variable regions thereof.

[0041] CDRs are defined in various ways in the art, including the Kabat, Chothia, AbM, and contact definitions. The Kabat definition is based on sequence variability and is the most commonly used definition to predict CDR regions (Johnson et al. (2000) Nucleic Acids Res. 28:214). The Chothia definition is based on the location of the structural loop regions (Chothia et al. (1986) J. Mol. Biol. 196:901; Chothia et al. (1989) Nature 342:877). The AbM definition, a compromise between the Kabat and Chothia definitions, is an integral suite of programs for antibody structure modeling produced by the Oxford Molecular Group (Martin et al. (1989) Proc. Nat'l. Acad. Sci. (USA) 86:9268; Rees et al., ABMTM, a computer program for modeling variable regions of antibodies, Oxford, UK; Oxford Molecular, Ltd.). An additional definition, known as the contact definition, has been recently introduced (see MacCallum et al. (1996) J. Mol. Biol. 5:732), which is based on an analysis of available complex crystal structures.

[0042] By convention, the CDR domains in the heavy chain are referred to as H1, H2, and H3, which are numbered sequentially in order moving from the amino terminus to the carboxy terminus. The CDR-H1 is about ten to 12 residues in length and starts four residues after a Cys according to the Chothia and AbM definitions, or five residues later according to the Kabat definition. The H1 can be followed by a Trp, Trp-Val, Trp-Ile, or Trp-Ala. The length of H1 is approximately ten to 12 residues according to the AbM definition, while the Chothia definition excludes the last four residues. The CDR-H2 starts 15 residues after the end of H1 according to the Kabat and AbM definitions, which is generally preceded by sequence Leu-Glu-Trp-Ile-Gly (but a number of variations are known) and is generally followed by sequence Lys/Arg-Leu/Ile/Val/Phe/Thr/Ala-Thr/Ser/Ile/Ala. According to the Kabat definition, the length of H2 is about 16 to 19 residues, while the AbM definition predicts the length to be nine to 12 residues. The CDR-H3 usually starts 33 residues after the end of H2, is generally preceded by the amino acid sequence Cys-Ala-Arg and followed by the amino acid Gly, and has a length that ranges from three to about 25 residues.

[0043] By convention, the CDR regions in the light chain are referred to as L1, L2, and L3, which are numbered sequentially in order moving from the amino terminus to the carboxy terminus. The CDR-L1 generally starts at about residue 24 and generally follows a Cys. The residue after the CDR-L1 is always Tip, which begins one of the following sequences: Trp-Tyr-Gln, Trp-Leu-Gln, Trp-Phe-Gln, or Trp-Tyr-Leu. The length of CDR-L1 is approximately ten to 17 residues. The CDR-L2 starts about 16 residues after the end of L1 and will generally follow residues Ile-Tyr, Val-Tyr, Ile-Lys, or Ile-Phe. The CDR-L2 is about seven residues in length. The CDR-L3 usually starts 33 residues after the end of L2 and generally follows a Cys, which is generally followed by the sequence Phe-Gly-XXX-Gly and has a length of about seven to 11 residues. A binding domain of this disclosure can comprise a single CDR from a variable region of an anti-TGFβ or anti-TGFβR2, or it can comprise multiple CDRs that can be the same or different.

[0044] Thus, a binding domain of this disclosure can comprise a single CDR from a variable region of an anti-TGFβ or anti-TGFβR2, or it can comprise multiple CDRs that can be the same or different. In certain embodiments, binding domains of this disclosure comprise V_{H} and V_{L} domains specific for a TGFβ or TGFβR2 comprising framework regions and CDR1, CDR2 and CDR3 regions, wherein (a) the V_{H} domain comprises an amino acid sequence of a heavy chain CDR3; or (b) the V_{L} domain comprises an amino acid sequence of a light chain CDR3; or (c) the binding domain comprises a V_{H} amino acid sequence of (a) and a V_{L} amino acid sequence of (b); or the binding domain comprises a V_{H} amino acid sequence of (a) and a V_{L} amino acid sequence of (b) and wherein the V_{H} and V_{L} are found in the same reference sequence. In further embodiments, binding domains of this disclosure comprise V_{H} and V_{L} domains specific for a TGFβ or TGFβR2 comprising framework regions and CDR1, CDR2 and CDR3 regions, wherein (a) the V_{H} domain comprises an amino acid sequence of a heavy chain CDR1, CDR2, and CDR3; or (b) the V_{L} domain comprises an amino acid sequence of a light chain CDR1, CDR2, and CDR3; or (c) the binding domain comprises a V_{H} amino acid sequence of (a) and a V_{L} amino acid sequence of (b); or the binding domain comprises a V_{H} amino acid sequence of (a) and a V_{L} amino acid sequence of (b), wherein the V_{H} and V_{L} amino acid sequences are from the same reference sequence.

[0045] In any of the embodiments described herein comprising specific CDRs, a binding domain can comprise (i) a V_{H} domain having an amino acid sequence that is at least 80%, 85%, 90%, 91%, 92%, 93%, 94%, 95%, 96%, 97%, 98%, or 99% identical to the amino acid sequence of a V_{H} domain, wherein each CDR has at most three amino acid changes (i.e., many of the changes will be in the framework regions); or (ii) a V_{L} domain having an amino acid sequence that is at least 80%, 85%, 90%, 91%, 92%, 93%, 94%, 95%, 96%, 97%, 98%, or 99% identical to the amino acid sequence of a V_{L} domain, wherein each CDR has at most three amino acid changes (i.e., many of the changes will be in the framework regions); or (iii) both a V_{H} domain of (i) and a V_{L} domain of (ii); or both a V_{H} domain of (i) and a V_{L} domain of (ii) wherein the V_{H} and V_{L} are from the same reference sequence.

[0046] A TGFβ antagonist domain of fusion proteins of this disclosure may be an immunoglobulin-like domain such as an immunoglobulin scaffold. Immunoglobulin scaffolds contemplated by this disclosure include a scFv, a domain antibody or a heavy chain-only antibody. In a scFv, this disclosure contemplates the heavy and light chain variable regions are joined by any linker peptide known in the art to be compatible with domain or region joinder in a binding molecule. Exemplary linkers are linkers based on the Gly₄Ser linker motif, such as (Gly₄Ser)ₙ, wherein n=1-5. If a binding domain of a fusion protein of this disclosure is based on a non-human immunoglobulin or includes non-human CDRs, the binding domain may be “humanized” according to methods known in the art.

[0047] Alternatively, a TGFβ antagonist domain of fusion proteins of this disclosure may be a scaffold other than an immunoglobulin scaffold. Other scaffolds contemplated by this disclosure present the TGFβ-specific CDR(s) in a functional conformation. Other scaffolds contemplated include, but are not limited to, an A domain molecule, a fibronectin III domain, an anticalin, an ankyrin-repeat engineered binding molecule, an adnectin, a Kunitz domain or a protein AZ domain affibody.

### IL6 Antagonists

[0048] As noted above, in certain embodiments the present disclosure provides polypeptides containing a binding region or domain that is an IL6 antagonist (e.g., preferentially inhibits IL6 trans-signaling or inhibits both IL6 cis- and trans-signaling). In certain embodiments, the present disclosure provides multi-specific fusion proteins containing a binding region or domain specific for an IL6/IL6R complex that has one or more of the following properties: (1) greater or equal affinity for an IL6/IL6R complex than for IL6 or IL6Rα alone or has greater affinity for IL6Rα alone or an IL6/IL6R complex than for IL6 alone, (2) competes with membrane gp130 for binding with a sIL6/IL6R complex or augments soluble gp130 binding to sIL6/IL6R complex, (3) preferentially inhibits IL6 trans-signaling over IL6 cis-signaling, or (4) does not inhibit signaling of gp130 family cytokines other than IL6. In certain preferred embodiments, a binding domain specific for an IL6/IL6R complex according to this disclosure has the following properties: (1) greater affinity for IL6Rα alone or an IL6xR complex than for IL6 alone, (2) augments soluble gp130 binding to sIL6/IL6R complex, (3) preferentially inhibits IL6 trans-signaling over IL6 cis-signaling, and (4) does not inhibit signaling of gp130 family cytokines other than IL6. For example, a binding region or domain specific for an IL6/IL6R complex may be an immunoglobulin variable binding domain or derivative thereof, such as an antibody, Fab, scFv, or the like. In the context of this disclosure, it should be understood that a binding region or domain specific for an IL6/IL6R complex is not gp130 as described herein.

[0049] As used herein, “IL6xR complex” or “IL6xR” refers to a complex of an IL6 with an IL6 receptor, wherein the IL6 receptor (also known as, for example, IL6Ra, IL6RA, IL6R1, and CD126) is either a membrane protein (referred to herein as mIL6R or mIL6Rα) or a soluble form (referred to herein as sIL6R or sIL6Rα). The term “IL6R” encompasses both mIL6Rα and sIL6Ra. In one embodiment, IL6xR comprises a complex of IL6 and mIL6Rα. In certain embodiments, the IL6xR complex is held together via one or more covalent bonds. For example, the carboxy terminus of an IL6R can be fused to the amino-terminus of an IL6 via a peptide linker, which is known in the art as a Hyper-IL6 (see, e.g., Fischer et al. (1997) Nat. Biotechnol. 15:142). A Hyper-IL6 linker can be comprised of a cross-linking compound, a one to 50 amino acid sequence, or a combination thereof. A Hyper-IL6 may further include a dimerization domain, such as an immunoglobulin Fc domain or an immunoglobulin constant domain sub-region. In certain embodiments, the IL6xR complex is held together via non-covalent interactions, such as by hydrogen bonding, electrostatic interactions, Van der Waal's forces, salt bridges, hydrophobic interactions, or the like, or any combination thereof. For example, an IL6 and IL6R can naturally associate non-covalently (e.g., as found in nature, or as synthetic or recombinant proteins) or each can be fused to a domain that promotes multimerization, such as an immunoglobulin Fc domain, to further enhance complex stability.

[0050] As used herein, “gp130” refers to a signal transduction protein that binds to an IL6xR complex. The gp130 protein can be in a membrane (mgp130), soluble (sgp130), or any other functional form thereof. Exemplary gp130 proteins have a sequence as set forth in GenBank Accession No. NP_{—}002175.2 or any soluble or derivative form thereof (see, e.g., Narazaki et al. (1993) Blood 82:1120 or Diamant et al. (1997) FEBS Lett. 412:379). By way of illustration and not wishing to be bound by theory, an mgp130 protein can bind to either an IL6/mILR or an IL6/sILR complex, whereas a sgp130 primarily binds with an IL6/sILR complex (see Scheller et al. (2006) Scand. J. Immunol. 63:321). Thus, certain embodiments of binding domains, or fusion proteins thereof, of the instant disclosure can inhibit IL6xR complex trans-signaling by binding with higher affinity to IL6xR than to either IL6 or IL6Rα alone and preferably by competing with sIL6xR complex binding to mgp130. A binding domain of the instant disclosure “competes” with gp130 binding to a sIL6xR when (1) a binding domain or fusion protein thereof prevents gp130 from binding a sIL6xR and the binding domain binds sIL6xR with equal or higher affinity as compared to the binding of gp130 with sIL6xR, or (2) a binding domain or fusion protein thereof enhances or promotes sgp130 binding to sIL6xR.

[0051] In one aspect, an IL6 antagonist of this disclosure has an affinity for IL6 or IL6xR complex that is at least 2-fold to 1000-fold greater than for IL6Rα alone or has an affinity for IL6Rα or IL6xR complex that is at least 2-fold to 1000-fold greater than for IL6 alone. By binding to IL6, IL6R, or IL6xR complex, an IL6 antagonist of this disclosure preferentially inhibits IL6 cis- and trans-signaling. In certain embodiments, the affinity of a binding domain for IL6 or sIL6xR complex is about the same as the affinity of gp130 for IL6xR complex—with “about the same” meaning equal or up to about 2-fold higher affinity. In certain embodiments, the affinity of the binding domain for IL6, IL6R, or IL6xR complex is higher than the affinity of gp130 for IL6xR complex by at least 2-fold, at least 3-fold, at least 4-fold, at least 5-fold, at least 6-fold, at least 7-fold, at least 8-fold, at least 9-fold, at least 10-fold, at least 15-fold, at least 20-fold, at least 25-fold, at least 50-fold, at least 100-fold, 1000-fold, or greater. For example, if the affinity of gp130 for a IL6xR complex is about 2 nM (see, e.g., Gaillard et al. (1999) Eur. Cytokine Netw. 10:337), then a binding domain having at least a 10-fold higher affinity for the IL6xR complex would have a dissociation constant (K_{d}) of about 0.2 nM or less.

[0052] In further embodiments, an IL6 antagonist binding domain of this disclosure comprises a polypeptide sequence that (a) binds to a sIL6xR complex with an affinity at least 2-fold, 10-fold, 25-fold, 50-fold, 75-fold to 100-fold, 100-fold to 1000-fold higher than for either IL6 or IL6Rα alone and (b) competes with membrane gp130 for binding to sIL6xR complex or augments soluble gp130 binding to sIL6xR complex. In further embodiments, a polypeptide binding domain of this disclosure that binds to a sIL6xR complex with an affinity at least 2-fold, 10-fold, 25-fold, 50-fold, 75-fold to 100-fold, 100-fold to 1000-fold higher than for either IL6 or IL6Rα alone may also (i) more significantly or preferentially inhibit IL6 trans-signaling over IL6 cis-signaling, (ii) not inhibit signaling of gp130 cytokine family members other than IL6, (iii) preferentially inhibit IL6 trans-signaling over IL6 cis-signaling and not detectably inhibit signaling of gp130 family cytokines other than IL6, (iv) may have two or more of these properties, or (v) may have all of these properties.

[0053] In certain embodiments, a polypeptide IL6 antagonist binding domain of this disclosure binds to a sIL6xR complex with an affinity at least 2-fold to 1000-fold higher than for either IL6 or IL6Rα alone and more significantly or preferentially inhibits IL6 trans-signaling over IL6 cis-signaling. To “preferentially inhibit IL6 trans-signaling over IL6 cis-signaling” refers to altering trans-signaling to an extent that sIL6xR activity is measurably decreased while the decrease in IL6 cis-signaling is not substantially altered (i.e., meaning inhibition is minimal, non-existent, or not measurable). For example, a biomarker for sIL6xR activity (e.g., acute phase expression of antichymotrypsin (ACT) in HepG2 cells) can be measured to detect trans-signaling inhibition. A representative assay is described by Jostock et al. (Eur. J. Biochem., 2001)—briefly, HepG2 cells can be stimulated to overexpress ACT in the presence of sIL6xR (trans-signaling) or IL6 (cis-signaling), but adding spg130 will inhibit the overexpression of ACT induced by sIL6xR while not substantially affecting IL6 induced expression. Similarly, a polypeptide binding domain of this disclosure that preferentially inhibits IL6 trans-signaling over IL6 cis-signaling will inhibit the overexpression of ACT induced by sIL6xR (i.e., inhibit trans-signaling) while not substantially affecting IL6 induced expression (i.e., not measurably decrease cis-signaling). This and other assays known in the art can be used to measure preferential inhibition of IL6 trans-signaling over IL6 cis-signaling (see, e.g., other biomarkers described in Sporri et al. (1999) Int. Immunol. 11:1053; Mihara et al. (1995) Br. J. Rheum. 34:321; Chen et al. (2004) Immun. 20:59).

[0054] In further embodiments, signaling by gp130 family cytokines other than IL6 is not substantially inhibited by binding domain polypeptides or multi-specific fusion proteins thereof of this disclosure. For example, cis- and trans-signaling by an IL6xR complex via gp130 will be inhibited, but signaling by one or more other gp130 family cytokines will be minimally affected or unaffected, such as signaling via leukemia inhibitory factor (LIF), ciliary neurotropic factor (CNTF), neuropoietin (NPN), cardiotropin like cytokine (CLC), oncostatin M (OSM), IL-11, IL-27, IL-31, cardiotrophin-1 (CT-1), or any combination thereof.

[0055] It will be appreciated by those skilled in the art that the preferred in vivo half-life of a binding domain of this disclosure is on the order of days or weeks, but while the binding domain concentration may be low, the target may be plentiful as both IL6 and sIL6 production can be quite elevated in disease states (see, e.g., Lu et al. (1993) Cytokine 5:578).

[0056] Thus, in certain embodiments, a binding domain of this disclosure has a k_{OFF} of about 10⁻⁵/sec (e.g., about a day) or less. In certain embodiments, the k_{OFF} can range from about 10⁻¹/sec, about 10⁻²/sec, about 10⁻³/sec, about 10⁻⁴/sec, about 10⁻⁵/sec, about 10⁻⁶/sec, about 10⁻⁷/sec, about 10⁻⁸/sec, about 10⁻⁹/sec, about 10⁻¹⁰/sec, or less.

[0057] In an illustrative example, binding domains of this disclosure specific for an IL6 or IL6xR complex were identified in a Fab phage library of fragments (see Hoet et al. (2005) Nature Biotechnol. 23:344) by screening for binding to a synthetic IL6xR complex. The synthetic IL6xR complex used for this screening comprises a structure of N-IL6Rα(frag)-L1-IL6(frag)-L2-ID-C, wherein N is the amino-terminus and C is the carboxy-terminus, IL6Rα(frag) is a fragment of full length IL6Rα, IL6(frag) is a fragment of IL6, L1 and L2 are linkers, and ID is an intervening or dimerization domain, such as an immunoglobulin Fc domain.

[0058] More specifically, an IL6xR (which is a form of Hyper IL6) used to identify the binding domains specific for IL6xR complex has a structure, from amino-terminus to carboxy-terminus, as follows: (a) a central fragment of 212 amino acids from IL6Rα that is missing the first 110 amino acids of the full length protein and a carboxy-terminal portion that will depend on the isoform used (see GenBank Accession No. NP_{—}000556.1, isoform 1 or NP_{—}852004.1, isoform 2) fused to (2) a linker of G₃S that is in turn fused to (3) a 175 amino acid carboxy-terminal fragment of IL6 (i.e., missing the first 27 amino acids of the full length protein; GenBank Accession No. NP_{—}000591.1) that is in turn fused to (4) a linker that is an IgG2A hinge as set forth in SEQ ID NO:589, which is finally fused to a dimerization domain comprised of an immunoglobulin G1 (IgG1) Fc domain. In certain embodiments, the dimerization domain comprised of an IgG1 Fc domain has one or more of the following amino acids mutated (i.e., have a different amino acid at that position): leucine at position 234 (L234), leucine at position 235 (L235), glycine at position 237 (G237), glutamate at position 318 (E318), lysine at position 320 (K320), lysine at position 322 (K322), or any combination thereof (EU numbering). For example, any one of these amino acids can be changed to alanine. In a further embodiment, an IgG1 Fc domain has each of L234, L235, G237, E318, K320, and K322 (according to Kabat numbering) mutated to an alanine (i.e., L234A, L235A, G237A, E318A, K320A, and K322A, respectively).

[0059] In one embodiment, an IL6xR complex used to identify the IL6 antagonist binding domains of this disclosure has an amino acid sequence as set forth in SEQ ID NO:606. In certain embodiments, there are provided polypeptides containing a binding domain specific for an IL6xR complex, wherein the IL6xR is a sIL6xR and has the amino acid sequence as set forth in SEQ ID NO:606. In further embodiments, polypeptides containing a binding domain specific for an IL6xR complex (1) have greater or equal affinity for an IL6xR complex than for IL6 or IL6Rα alone, or have greater affinity for IL6Rα alone or an IL6xR complex than for IL6 alone, (2) compete with membrane gp130 for binding with a sIL6xR complex or augment soluble gp130 binding to sIL6xR complex, (3) preferentially inhibit IL6 trans-signaling over IL6 cis-signaling, or (4) do not inhibit signaling of gp130 family cytokines other than IL6, (5) have any combination thereof of properties (1)-(4), or (6) have all of the properties of (1)-(4). Other exemplary IL6xR complexes that may be used to identify binding domains of the instant disclosure or used as a reference complex to measure any of the aforementioned binding properties are described, for example, in US Patent Publication Nos. 2007/0172458; 2007/0031376; and U.S. Pat. Nos. 7,198,781; 5,919,763.

[0060] In some embodiments, IL6 antagonist binding domains of this disclosure comprise V_{H} and V_{L} domains specific for an IL6, IL6R, or IL6xR complex as described herein, and preferably human IL6, human IL6R, or human IL6xR complex. In certain embodiments, the V_{H} and V_{L} domains are rodent, (e.g., mouse, rat), humanized, or human. Examples of binding domains containing such V_{H} and V_{L} domains specific for IL6, IL6R, or IL6xR are set forth in SEQ ID NOS:435-496 and 373-434, respectively. In further embodiments, there are provided polypeptide binding domains specific for an IL6xR wherein the binding domain comprises a sequence that is at least 90%, at least 91%, at least 92%, at least 93%, at least 94%, at least 95%, at least 96%, at least 97%, at least 98%, at least 99%, at least 99.5%, or at least 100% identical to the amino acid sequence of one or more light chain variable regions (V_{L}) or to one or more heavy chain variable regions (V_{H}), or both, as set forth in SEQ ID NOS:373-434 and 435-496, respectively, wherein each CDR has up to three amino acid changes (i.e., many of the changes are found in one or more of the framework regions).

[0061] In further embodiments, binding domains of this disclosure comprise V_{H} and V_{L} domains specific for an IL6xR as set forth in SEQ ID NOS:435-496 and 373-434, respectively, which are at least 80%, at least 81%, at least 82%, at least 83%, at least 84%, at least 85%, at least 86%, at least 87%, at least 88%, at least 89%, at least 90%, at least 91%, at least 92%, at least 93%, at least 94%, at least 95%, at least 96%, at least 97%, at least 98%, at least 99%, or at least 99.5% identical to the amino acid sequence of such V_{H} domain, V_{L} domain, or both, wherein each CDR has zero, one, two, or three amino acid changes. For example, the amino acid sequence of a V_{H} domain, V_{L} domain, or both of this disclosure can be at least 80%, at least 81%, at least 82%, at least 83%, at least 84%, at least 85%, at least 86%, at least 87%, at least 88%, at least 89%, at least 90%, at least 91%, at least 92%, at least 93%, at least 94%, at least 95%, at least 96%, at least 97%, at least 98%, at least 99%, or at least 99.5% identical to the amino acid sequence of V_{H} domain (e.g., amino acids 512 to 636), V_{L} domain (e.g., amino acids 652 to 759), or both, respectively, from an exemplary xceptor molecule containing binding domain TRUE-1002 (see SEQ ID NO:608), wherein each CDR has zero, one, two, or three amino acid changes.

[0062] In any of these or other embodiments described herein, the V_{L} and V_{H} domains may be arranged in either orientation and may be separated by up to about a ten amino acid linker as disclosed herein or any other amino acid sequence capable of providing a spacer function compatible with interaction of the two sub-binding domains. In certain embodiments, a linker joining the V_{H} and V_{L} domains comprises an amino acid sequence as set forth in SEQ ID NO:497-604 and SEQ ID NO:1223-1228, such as Linker 47 (SEQ ID NO:543) or Linker 80 (SEQ ID NO:576).

[0063] In further embodiments, IL6 antagonist binding domains of this disclosure may comprise one or more complementarity determining region (“CDR”), or multiple copies of one or more such CDRs, which have been obtained, derived, or designed from variable regions of an anti-IL6, anti-IL6R, or anti-IL6xR complex scFv or Fab fragment or from heavy or light chain variable regions thereof. Thus, a binding domain of this disclosure can comprise a single CDR from a variable region of an IL6 or anti-IL6xR, or it can comprise multiple CDRs that can be the same or different. In certain embodiments, IL6 antagonist binding domains of this disclosure comprise V_{H} and V_{L} domains comprising framework regions and CDR1, CDR2 and CDR3 regions, wherein (a) the V_{H} domain comprises the amino acid sequence of a heavy chain CDR3 found in any one of SEQ ID NOS:435-496; or (b) the V_{L} domain comprises the amino acid sequence of a light chain CDR3 found in any one of SEQ ID NOS:373-434; or (c) the binding domain comprises a V_{H} amino acid sequence of (a) and a V_{L} amino acid sequence of (b); or the binding domain comprises a V_{H} amino acid sequence of (a) and a V_{L} amino acid sequence of (b) and wherein the V_{H} and V_{L} are found in the same reference sequence. In further embodiments, binding domains of this disclosure comprise V_{H} and V_{L} domains specific for an IL6xR complex comprising framework regions and CDR1, CDR2 and CDR3 regions, wherein (a) the V_{H} domain comprises the amino acid sequence of a heavy chain CDR1, CDR2, and CDR3 found in any one of SEQ ID NOS:435-496; or (b) the V_{L} domain comprises the amino acid sequence of a light chain CDR1, CDR2, and CDR3 found in any one of SEQ ID NOS:373-434; or (c) the binding domain comprises a V_{H} amino acid sequence of (a) and a V_{L} amino acid sequence of (b); or the binding domain comprises a V_{H} amino acid sequence of (a) and a V_{L} amino acid sequence of (b), wherein the V_{H} and V_{L} amino acid sequences are from the same reference sequence. Exemplary light and heavy chain variable domain CDRs directed against IL6, IL6R, or IL6xR complex are provided in SEQ ID NO:1-186 and 1187-1192, and 187-372 and 1193-1198, respectively.

[0064] Amino acid sequences of IL6 antagonist light chain variable regions are provided in SEQ ID NO:373-434 and 1199-1204, with the corresponding heavy chain variable regions being provided in SEQ ID NO:435-496 and 1205-1210, respectively.

[0065] In any of the embodiments described herein comprising specific CDRs against IL6, IL6R, or IL6xR, a binding domain can comprise (i) a V_{H} domain having an amino acid sequence that is at least 80%, 85%, 90%, 91%, 92%, 93%, 94%, 95%, 96%, 97%, 98%, or 99% identical to the amino acid sequence of a V_{H} domain found in any one of SEQ ID NOS:435-496; or (ii) a V_{L} domain having an amino acid sequence that is at least 80%, 85%, 90%, 91%, 92%, 93%, 94%, 95%, 96%, 97%, 98%, or 99% identical to the amino acid sequence of a V_{L} domain found in any one of SEQ ID NOS:373-434; or (iii) both a V_{H} domain of (i) and a V_{L} domain of (ii); or both a V_{H} domain of (i) and a V_{L} domain of (ii) wherein the V_{H} and V_{L} are from the same reference sequence.

[0066] In certain embodiments, a binding domain of this disclosure may be an immunoglobulin-like domain, such as an immunoglobulin scaffold. Immunoglobulin scaffolds contemplated in this disclosure include a scFv, Fab, a domain antibody, or a heavy chain-only antibody. In further embodiments, there are provided anti-IL6 or anti-IL6xR antibodies (e.g., non-human such as mouse or rat, chimeric, humanized, human) or Fab fragments or scFv fragments that have an amino acid sequence that is at least 80%, 85%, 90%, 91%, 92%, 93%, 94%, 95%, 96%, 97%, 98%, 99%, or 100% identical to the amino acid sequence of a V_{H} and V_{L} domain set in any one of SEQ ID NOS:435-496 and 373-434, respectively, which may also have one or more of the following properties: (1) have greater or equal affinity for an IL6xR complex than for IL6 or IL6Rα alone, or have greater affinity for IL6Rα alone or an IL6xR complex than for IL6 alone, (2) compete with membrane gp130 for binding with a sIL6xR complex or augment soluble gp130 binding to sIL6xR complex, (3) preferentially inhibit IL6 trans-signaling over IL6 cis-signaling, or (4) do not inhibit signaling of gp130 family cytokines other than IL6. Such antibodies, Fabs, or scFvs can be used in any of the methods described herein. In certain embodiments, the present disclosure provides polypeptides containing a binding domain that is an IL6 antagonist (i.e., can inhibit IL6 cis- and trans-signaling). In further embodiments, an IL6 antagonist according to this disclosure does not inhibit signaling of gp130 family cytokines other than IL6. Exemplary IL6 antagonists include binding domains specific for an IL6 or IL6xR, such as an immunoglobulin variable binding domain or derivative thereof (e.g., an antibody, Fab, scFv, or the like).

[0067] Alternatively, binding domains of this disclosure may be part of a scaffold other than an immunoglobulin. Other scaffolds contemplated include an A domain molecule, a fibronectin III domain, an anticalin, an ankyrin-repeat engineered binding molecule, an adnectin, a Kunitz domain, or a protein AZ domain affibody.

### IL10 Antagonists

[0068] In certain embodiments the present disclosure provides polypeptides containing a binding region or domain that is an IL10 antagonist (i.e., can inhibit IL10 signaling). Exemplary IL10 antagonists include binding domains specific for an IL10 or IL10R1, such as an immunoglobulin variable binding domain or derivative thereof (e.g., an antibody, Fab, scFv, or the like), or an IL10R1 ectodomain.

[0069] IL10 is a member of a cytokine superfamily that share an alpha-helical structure. Although no empirical evidence exists, it has been suggested that all possess six alpha-helices (Fickenscher, H. et al., 2002, Trends Immunol. 23: 89). IL10 has four cysteines, only one of which is conserved among family members. Since IL10 demonstrates a V-shaped fold that contributes to its dimerization, it appears that disulfide bonds are not critical to this structure. Amino acid identity of family members to IL10 ranges from 20% (IL-19) to 28% (IL-20) (Dumouter et al., 2002, Eur. Cytokine Netw. 13: 5).

[0070] IL10 was first described as a Th2 cytokine in mice that inhibited IFN-α and GM-CSF cytokine production by Th1 cells (Moore et al., 2001, Annu Rev. Immunol. 19: 683; Fiorentino et al., 1989, J. Exp. Med. 170:2081).

[0071] Human IL10 is 178 amino acids in length with an 18 amino acid signal sequence and a 160 amino acid mature segment and a molecular weight of approximately 18 kDa (monomer). Human IL10 contains no potential N-linked glycosylation site and is not glycosylated (Dumouter et al., 2002, Eur. Cytokine Netw. 13: 5; Vieira et al., 1991, Proc. Natl. Acad. Sci. USA 88:1172). It contains four cysteine residues that form two intrachain disulfide bonds. The length of α-helices A to F in human IL10 are 21, 8, 19, 20, 12 and 23 amino acids, respectively. Helices A to D of one monomer noncovalently interact with helices E and F of a second monomer, forming a noncovalent V-shaped homodimer. Functional areas have been mapped on the IL10 molecule. In the N-terminus, pre-helix A residues no. 1-9 are involved in mast cell proliferation, while in the C-terminus, helix F residues no. 152-160 mediate leukocyte secretion and chemotaxis.

[0072] Cells known to express IL10 include CD8+ T cells, microglia, CD14+ (but not CD16+) monocytes, Th2 CD4+ cells (mice), keratinocytes, hepatic stellate cells, Th1 and Th2 CD4+ T cells (human), melanoma cells, activated macrophages, NK cells, dendritic cells, B cells (CD5+ and CD19+) and eosinophils.

[0073] On T cells, the initial observations of IL10 inhibition of IFN-gamma production are now believed to be an indirect effect mediated by accessory cells. Additional effects on T cells, however, include: IL10 induced CD8+ T cell chemotaxis, an inhibition of CD4+ T cell chemotaxis towards IL-8, suppression of IL-2 production following activation, an inhibition of T cell apoptosis via Bcl-2 up-regulation, and an interruption of T cell proliferation following low antigen exposure accompanied by B7/CD28 costimulation (Akdis et al., 2001, Immunology 103: 131).

[0074] On B cells, IL10 has a number of related, yet distinct functions. In conjunction with TNF-β and CD40L, IL10 induces IgA production in naïve (IgD+) B cells. It is believed that TGF-β/CD40L promotes class switching while IL10 initiates differentiation and growth. When TGF-β is not present, IL10 cooperates with CD40L in inducing IgG1 and IgG3 (human), and thus may be a direct switch factor for IgG subtypes. IL10 has divergent effects on IL-4 induced IgE secretion. If IL10 is present at the time of IL-4 induced class switching, it reverses the effect; if it is present after IgE commitment, it augments IgE secretion. CD27/CD70 interaction in the presence of IL10 promotes plasma cell formation from memory B cells (Agematsu et al., 1998, Blood 91: 173).

[0075] Mast cells and NK cells are also impacted by IL10. On mast cells, IL10 induces histamine release while blocking GM-CSF and TNF-α release. This effect may be autocrine as IL10 is known to be released by mast cells in rat. As evidence of its pleiotrophic nature, IL10 has the opposite effects on NK cells. Rather than blocking TNF-α and GM-CSF production, IL10 actually promotes this function on NK cells. In addition, it potentiates IL-2 induced NK cell proliferation and facilitates IFN-γ secretion in NK cells primed by IL-18. In concert with both IL-12 and/or IL-18, IL10 potentiates NK cell cytotoxicity (Cai et al., 1999, Eur. J. Immunol. 29: 2658).

[0076] IL10 has a pronounced anti-inflammatory impact on neutrophils. It inhibits the secretion of the chemokines MIP-1α, MIP-1β and IL-8, and blocks production of the proinflammatory mediators IL-1β and TNF-α. In addition, it decreases the ability of neutrophils to produce superoxide, and as a result interferes with PMN-mediated antibody-dependent cellular cytotoxicity. IL10 also blocks IL-8 and fMLP-induced chemotaxis, possibly via CXCR1 (Vicioso et al., 1998 Eur. Cytokine Netw. 9: 247).

[0077] On dendritic cells (DCs), IL10 generally exhibits immunosuppressive effects. It would appear to promote CD14+ macrophage differentiation at the expense of DCs. Macrophages, while phagocytic, are poor antigen-presenting cells. IL10 seems to decrease the ability of DCs to stimulate T cells, particularly for Th1 type cells. How IL10 accomplishes this is unclear, as the data within the literature is conflicting. Relative to MHC-II expression, it can be down-regulated, unchanged, or up-regulated (Sharma et al., 1999, J. Immunol. 163:5020). With respect to B7-1/CD80, IL10 will either up-regulate or down-regulate its expression. B7-2/CD86 plays a key role in T cell activation. For this molecule, IL10 is involved in both up-regulation and down-regulation. Perhaps the most significant modulation, however, occurs with CD40 (IL10 seems to reduce its expression). At the regional level, IL10 may block immunostimulation by inhibiting Langerhans cell migration in response to proinflammatory cytokines. Alternatively, IL10 blocks an inflammation-induced DC maturation step that normally involves CCR1, CCR2 and CCR5 down-regulation and CCR7 up-regulation. This blockage, with retention of CCR1, CCR2 and CCR5, results in a failure of DCs to migrate to regional nodes. The result is an immobile DC that will not stimulate T cells but will bind (and clear) proinflammatory chemokines without responding to them (D-Amico et al., 2000 Nat. Immunol. 1:387).

[0078] On monocytes, IL10 has a number of documented effects. For example, IL10 seems to clearly reduce cell surface MHC-II expression. It also inhibits IL-12 production following stimulation. While it promotes a monocyte to macrophage transition in conjunction with M-CSF, the phenotype of the macrophage is not clear (i.e. CD16+/cytotoxic vs. CD16−). IL10 also reduces monocyte GM-CSF secretion and IL-8 production, while promoting IL-1ra release (Gesser et al., 1997, Proc. Natl. Acad. Sci. USA 94:14620). Hyaluronectin, a connective tissue component, is now known to be secreted by monocytes in response to IL10. This may have some importance in cell migration, particularly tumor cell metastases, where hyaluronectin is known to interrupt cell migration through extracellular space (Gesser et al., 1997).

[0079] Human IL10R1 is a 90-110 kDa, single-pass type I transmembrane glycoprotein that is expressed on a limited number of cell types (Liu et al., 1994, J. Immunol. 152:1821). Weak expression is seen in pancreas, skeletal muscle, brain, heart and kidney. Placenta, lung, and liver showed intermediate levels of expression, while monocytes, B-cells, large granular lymphocytes and T-cells express high levels (Liu et al., 1994). The expressed protein is a 578 amino acid protein that contains a 21 amino acid signal peptide, a 215 amino acid extracellular region, a 25 amino acid transmembrane segment, and a 317 amino acid cytoplasmic domain. There are two FNIII motifs within the extracellular region and a STAT3 docking site plus a JAK1 association region within the cytoplasmic domain (Kotenko et al., 2000 Oncogene 19:2557; Kotenko et al., 1997, EMBO J. 16:5894). IL10R1 binds human IL10 with a Kd of about 200 pM.

[0080] In some embodiments, binding domains of this disclosure comprise V_{H} and V_{L} domains specific for an IL10 or an IL10R1. In certain embodiments, the V_{H} and V_{L} domains are rodent (e.g., mouse, rat), humanized, or human. Examples of binding domains containing such V_{H} and V_{L} domains specific for IL10 include, but are not limited to, those disclosed in US Patent Application Publication no. US 2007/0178097A1. Binding domains of this disclosure may also, or alternatively, comprise an IL10R1 ectodomain as shown, for example, in SEQ ID NO:745, or a fragment thereof. In further embodiments, there are provided polypeptide binding domains specific for IL10, wherein the binding domain comprises a sequence that is at least 80%, at least 85%, at least 90%, at least 91%, at least 92%, at least 93%, at least 94%, at least 95%, at least 96%, at least 97%, at least 98%, at least 99%, at least 99.5%, or at least 100% identical to an amino acid sequence of SEQ ID NO:745 or to amino acids 22-401 of SEQ ID NO:745, wherein the polypeptide binding domain binds to IL10 and inhibits the activity thereof.

### GITR Agonists

[0081] In certain embodiments the present disclosure provides polypeptides containing a binding region or domain that is a GITR agonist (i.e., can increase GITR signaling). Exemplary GITR agonists include binding domains specific for a GITR or GITRL, such as an immunoglobulin variable binding domain or derivative thereof (e.g., an antibody, Fab, scFv, or the like), or a GITRL ectodomain.

[0082] Glucocorticoid-induced tumor necrosis factor receptor (GITR; also known as AITR) is a type I transmembrane protein and a member of the TNF receptor superfamily (Nocentini et al., (2007) Eur. J. Immunol. 37:1165-9). The cytoplasmic domain has homology to the cytoplasmic domain of 4-1BB and CD27. GITR is expressed in peripheral blood T cells, bone marrow, thymus, spleen, and lymph nodes, and is constitutively expressed in CD4⁺CD25⁺ regulatory T cells (Kwon et al., (2003) Exp. Mol. Med. 35:13). In addition, it is constitutively expressed at low levels in natural killer (NK) cells and is induced upon stimulation by either Toll-like receptor ligand or IL-15 (Liu et al., (2008) J. Biol. Chem. 283:8202).

[0083] Expression of GITR is increased following T cell activation. Activation of GITR coactivates effector T lymphocytes and modulates regulatory T cell activity. Binding of GITR to its ligand GITRL has been shown to render CD4⁺CD25⁻ effector T cells resistant to the inhibitory effects of CD4⁺CD25⁺ regulatory T cells.

[0084] GITR ligand (GITRL) is a type II membrane protein. It is 173 amino acids long with a predicted molecular weight of 20 kDa. The experimental molecular weight of 25-28 kDa is suggestive of glycosylation. GITRL is expressed in antigen presenting cells (APC) and is constitutively expressed in human umbilical vein endothelial cells (Nocentini et al. Ibid). It is not, however, expressed in resting or stimulated T cells, B cell lines, or peripheral blood mononuclear cells.

[0085] The GITR/GITRL system has been shown to increase resistance to tumors and viral infections (Nocentini et al., ibid). Specifically, the anti-GITR monoclonal antibody DTA-1 was shown to inhibit regulatory T cell-dependent suppression and enhance T cell responses. Administration of DTA-1 in mice induced B16 melanoma tumor rejection. GITR is also involved in autoimmune/inflammatory processes and regulates leukocyte extravasation. GITR−/− mice exhibit decreased sensitivity to inflammatory disease conditions, indicating a positive role for GITR in inflammation.

[0086] In some embodiments, binding domains of this disclosure comprise V_{H} and V_{L} domains specific for a GITR or a GITRL. In certain embodiments, the V_{H} and V_{L} domains are rodent (e.g., mouse, rat), humanized, or human. Examples of binding domains containing such V_{H} and V_{L} domains specific for GITR include, but are not limited to, those disclosed in US Patent Application Publication no. US 2007/0098719A1. Binding domains of this disclosure may also, or alternatively, comprise a GITRL ectodomain (e.g. amino acids 74-181 of Genbank Accession NP_{—}005083.2 (SEQ ID NO:746) or a fragment thereof. In further embodiments, there are provided polypeptide binding domains specific for GITR, wherein the binding domain comprises a sequence that is at least 80%, at least 85%, at least 90%, at least 91%, at least 92%, at least 93%, at least 94%, at least 95%, at least 96%, at least 97%, at least 98%, at least 99%, at least 99.5%, or at least 100% identical to amino acids 74-181 of SEQ ID NO:746, wherein the polypeptide binding domain binds to GITR and increases the activity thereof.

### VEGF Antagonists

[0087] In certain embodiments the present disclosure provides polypeptides containing a binding region or domain that is a VEGF antagonist (i.e., can inhibit VEGF signaling). Exemplary VEGF antagonists include binding domains specific for a VEGF or VEGFR2, such as an immunoglobulin variable binding domain or derivative thereof (e.g., an antibody, Fab, scFv, or the like), or a VEGFR2 ectodomain.

[0088] Vascular endothelial growth factor (VEGF or VEGF-A) is an evolutionarily conserved homodimeric glycoprotein and a potent endothelial cell—specific mitogen that plays a critical role in angiogenesis and vasculogenesis (Lee et al. (2007) PLOS Medicine 6:1101-1116). VEGF induces various intracellular signaling and physiologic responses that are essential for angiogenesis, such as intracellular Ca²⁺ influx, chemotaxis (migration), expression of plasminogen activators, urokinase receptor and collagenases, and vascular permeability. Its biological effects are elicited through two high-affinity receptor tyrosine kinases, namely VEGF receptors 1 (VEGFR1) and 2 (VEGFR2), which are mainly expressed in endothelial cells.

[0089] VEGFA is a secreted protein that is a homodimer linked by disulfide bonds. It is also found as heterodimer with P1GF. Alternative splicing of VEGF mRNA results in various isoforms, which include VEGF121, VEGF145, VEGF165, VEGF189 and VEGF206, in humans and VEGF120, VEGF164 and VEGF188 in mice. Studies of genetically engineered mice expressing only one VEGF isoform indicate that VEGF isoforms have distinct yet some overlapping roles in vascular development and function as evidenced by tissue-specific vascular defects in these mice. The VEGF isoforms display differences in their biochemical properties, including receptor binding with VEGF165 and VEGF188 but not VEGF120 binding to neuropilins and heparan sulfate. The differential affinity to heparan sulfate is important in their binding to VEGFR1 and VEGF2, as heparan sulfate can mediate the binding and transactivation of these receptors. Furthermore, differential binding to heparan sulfate is reported to lead to different VEGF actions, including endothelial cell survival, adhesion and vascular branch formation. Both VEGF164 and VEGF188 bind heparan sulfate, making them partially or fully cell-bound, respectively, whereas VEGF120 does not bind heparan sulfate, and is freely diffusible.

[0090] The VEGF isoforms display tissue-specific patterns of expression. The VEGF189, VEGF-165 and VEGF-121 isoforms are widely expressed, whereas the VEGF206 and VEGF-145 are uncommon. Its expression is regulated by growth factors, cytokines, gonadotropins, nitric oxide, hypoxia, hypoglycemia and oncogenic mutations.

[0091] The classical role of VEGF in tumor progression is as a positive regulator of angiogenesis, the process of forming new capillaries from preexisting blood vessels. Tumor growth is highly dependent on the ability of tumors to induce their own vascularization. VEGF expression has been reported in a number of cancer cell lines and in several clinical specimens derived from breast, brain, and ovarian cancers. Thus, antagonism of VEGF can effectively prevent tumor growth through incomplete blood vessel formation. VEGF exerts its effects on endothelial cells in a paracrine mode after its release by other cells such as tumor cells, or in an autocrine manner in VEGF-producing endothelial cells. VEGF binds to its cognate receptors VEGFR1 (also known as FLT1), VEGFR2 (also known as KDR or FLK1), and neuropilin 1 (NRP1).

[0092] VEGF expression in the adult is cell-type specific and is controlled at many levels from transcription to translation, and is upregulated in tumors and in various pathologic states. One of the best-characterized stimuli of VEGF transcription is hypoxia, which acts by stabilization of the hypoxia-inducible factor-1 alpha (HIF1α) transcription factor. Hypoxic regulation of VEGF also takes place post-transcriptionally via mRNA stabilization. VEGF expression is induced by other growth factors and cytokines including IGF-1, Il-6, Il-1, PDGF, TNF-α, TGF-β and FGF-4. In addition, VEGF expression is also stimulated by physical forces, including stretch, with one putative transcription factor being the Kruppel like factor-2. Analysis of the VEGF promoter reveals many other potential transcription factor responsive elements, of which several pathways have been elucidated, for example EGF and HGF signaling via the SP1 responsive element.

[0093] Members of the VEGF family promote two very important processes in vivo, angiogenesis and lymphangiogenesis, which involve growth of new blood and lymphatic vessels from pre-existing vasculature, respectively. These processes control the normal processes of wound healing, ovarian-follicular development, endometrium growth and pathological processes such as retinopathies, rheumatoid arthritis and solid tumor growth. A newly identified splice variant of VEGF, VEGF165b, is postulated to have an inhibitory effect on angiogenesis. Lymphangiogenesis is correlated with lymph node metastasis and cancer spread via the lymphatic system.

[0094] VEGF activities are mediated by high-affinity receptor tyrosine kinases expressed primarily in endothelial cells. These are: VEGFR-1 (Flt-1) and VEGFR-2 (Flk-1/KDR), which are mainly expressed by blood vessel endothelial cells and VEGFR-3 (Flt-4) expressed in lymphatic endothelial cells. These receptors are characterized by seven extracellular immunoglobulin-like domains, which bind the growth factor, followed by a single membrane-spanning region and a conserved intracellular tyrosine kinase domain interrupted by a kinase insert sequence. These receptors are themselves enzymes and once activated by ligand binding, they dimerize and undergo autophosphorylation. This step enhances the capacity of the receptor to directly activate other target proteins by phosphorylating them on specific tyrosine residues.

[0095] The VEGF-kinase ligand/receptor signaling system plays a key role in vascular development and regulation of vascular permeability. In case of HIV-1 infection, the interaction with extracellular viral Tat protein seems to enhance angiogenesis in Kaposi's sarcoma lesions.

[0096] Although VEGF binds to VEGFR1, VEGFR2, Nip-1 and Nrp-2, its main signaling receptor in the endothelium is VEGFR2. VEGFR2 belongs to the family of receptor tyrosine kinases, and upon VEGF binding, there is dimerization and activation of the tyrosine kinase, resulting in phosphorylation of specific tyrosine residues on the cytoplasmic tail, which in turn promotes docking of signal transducing molecules. VEGFR2 is responsible for initiating signal transduction pathways within endothelial cells. Following the binding of VEGF to VEGFR2, VEGF mediates its effects on proliferation, survival, adhesion, migration, capillary morphogenesis, and gene expression in endothelial cells. VEGFR1 has a relatively minor role in VEGF-mediated signal transduction as compared to VEGFR2, since its kinase activity is 10-fold less than that of VEGFR2. Breast cancer cell lines express both VEGF and the VEGF receptors VEGFR1, VEGFR2, and NRP1. Recent studies have shown that VEGF acts as an autocrine growth and survival factor for VEGF receptor-expressing tumor cells. However, the mechanism by which VEGF mediates the survival of tumor cells needs to be investigated in depth (Lee et al., 2007, PLOS Medicine 6: 1101-1116).

[0097] Although VEGFR1 is also expressed by endothelial cells (EC), it is believed to act primarily to modulate VEGFR2 signaling. Mitogenesis, chemotaxis, cell survival and changes in the morphology of endothelial cells are mainly mediated by VEGFR-2. The mitogenic signal is induced by activation of the Raf-Mek-Erk pathway, while the antiapoptotic effects and chemotaxis are mediated by PI3K/Akt activation. VEGF binding to VEGFR-2 also results in activation of several integrins, which are adhesion molecules involved in angiogenesis, in a PI3K/Akt dependent manner. Apart from being expressed in endothelial cells, VEGFR-2 is also found in haematopoietic stem cells, where it increases their survival, and in retinal progenitor cells, where it plays a critical role in neurogenesis and vasculogenesis.

[0098] In some embodiments, binding domains of this disclosure comprise V_{H} and V_{L} domains specific for a VEGF or a VEGFR2. In certain embodiments, the V_{H} and V_{L} domains are rodent (e.g., mouse, rat), humanized, or human. Examples of binding domains containing such V_{H} and V_{L} domains specific for VEGF include, but are not limited to, those disclosed in US Patent Application Publication no. US 2007/0141065A1. Binding domains of this disclosure may also, or alternatively, comprise a VEGFR2 ectodomain (see, Genbank Accession NP_{—}002244.1, SEQ ID NO:747) or a fragment thereof. In further embodiments, there are provided polypeptide binding domains specific for VEGF, wherein the binding domain comprises a sequence that is at least 80%, at least 85%, at least 90%, at least 91%, at least 92%, at least 93%, at least 94%, at least 95%, at least 96%, at least 97%, at least 98%, at least 99%, at least 99.5%, or at least 100% identical to an amino acid sequence of SEQ ID NO:747, wherein the polypeptide binding domain binds to VEGF and inhibits the activity thereof.

### TNFα Antagonists

[0099] In certain embodiments the present disclosure provides polypeptides containing a binding region or domain that is a TNFα antagonist (i.e., can inhibit TNFα signaling). Exemplary TNFα antagonists include binding domains specific for a TNFα, such as an immunoglobulin variable binding domain or derivative thereof (e.g., an antibody, Fab, scFv, or the like), or a TNFR1 or TNFR2 ectodomain.

[0100] Tumor Necrosis Factor Receptor (TNFR) is a member of the tumor necrosis factor receptor superfamily and is the receptor for Tumor Necrosis Factor-α (TNFα), also known as CD120 or cachectin. There are two variants of this cytokine receptor, TNFR1 and TNFR2, (CD120a receptor and CD120b receptor). TNFR1 (Genbank accession no. NP_{—}001056.1) has a molecular weight of about 55 KD and is therefore sometimes referred to as p55. A TNFR domain that may be used as a TNFα binding domain in the disclosed fusion proteins is located at amino acids 44-149 of the TNFR1 sequence. TNFR2 (Genbank accession no. NP_{—}001057.1) has a molecular weight of about 75 KD and is therefore sometimes referred to as p75. A TNFR domain that may be used as a TNFα binding domain in the disclosed fusion proteins is located at amino acids 40-141 of the TNFR2 sequence.

[0101] A majority of cell types and tissues appear to express both TNF receptors. Both exist in cell surface as well as soluble forms and both are active in signal transduction, although they are able to mediate distinct cellular responses. TNFR1 appears to be responsible for signaling most TNF responses. Among other activities, TNFR2 stimulates thymocyte proliferation, activates NF-κβ, and is an accessory to TNFR1 in the signaling of responses primarily mediated by TNF-R1, like cytotoxicity.

[0102] TNF antagonists, such as anti-TNF antibodies, can positively affect various inflammatory conditions. For example, infliximab is indicated in the United States for the treatment of rheumatoid arthritis, Crohn's disease, ankylosing spondylitis, psoriatic arthritis, plaque psoriasis, and ulcerative colitis. Recently, perispinal delivery of the TNFα inhibitor etanercept has been shown to reduce symptoms in patients with Alzheimer's disease (Tobinick and Gross (2008) BMC Neurol. 8:27-36; Griffin (2008) J. Neuroinflammation, 5:3-6).

[0103] According to REMICADE® (infliximab) prescribing information, biological activities attributed to TNF include: induction of pro-inflammatory cytokines such as interleukins (IL) 1 and 6, enhancement of leukocyte migration by increasing endothelial layer permeability and expression of adhesion molecules by endothelial cells and leukocytes, activation of neutrophil and eosinophil functional activity, induction of acute phase reactants and other liver proteins, as well as tissue degrading enzymes produced by synoviocytes and/or chondrocytes.

[0104] In some embodiments, binding domains of this disclosure comprise V_{H} and V_{L} domains specific for a TNFα. In certain embodiments, the V_{H} and V_{L} domains are human. Examples of binding domains containing such V_{H} and V_{L} domains specific for TNFα include, but are not limited to, those disclosed in US Patent Application Publication no. US 2007/0249813. Binding domains of this disclosure may also, or alternatively, comprise a TNFR1 ectodomain (see, Genbank Accession NP_{—}001056.1, SEQ ID NO:749) or a fragment thereof, or a TNFR2 ectodomain (see, Genbank Accession NP_{—}001057.1, SEQ ID NO:748) or a fragment thereof. TNFR1 and TNFR2 ectodomains are described in US Patent Application Publication no. US 2007/0128177. In further embodiments, there are provided polypeptide binding domains specific for TNFα, wherein the binding domain comprises a sequence that is at least 80%, at least 85%, at least 90%, at least 91%, at least 92%, at least 93%, at least 94%, at least 95%, at least 96%, at least 97%, at least 98%, at least 99%, at least 99.5%, or at least 100% identical to an amino acid sequence of SEQ ID NO:748 or 749, wherein the polypeptide binding domain binds to TNFα and inhibits the activity thereof.

### HGF Antagonists

[0105] As noted above, in certain embodiments the present disclosure provides polypeptides containing a binding region or domain that is a HGF antagonist (i.e., can inhibit HGF signaling). Exemplary HGF antagonists include binding domains specific for a HGF, such as an immunoglobulin variable binding domain or derivative thereof (e.g., an antibody, Fab, scFv, or the like), or a c-Met ectodomain or sub-domain thereof (e.g., a Sema domain, a PSI domain, or both domains of c-Met).

[0106] The tyrosine kinase receptor c-Met (also known as the hepatocyte growth factor receptor, HGFR, because hepatocyte growth factor (HGF) is one of its ligands) is active during the normal processes of embryogenesis and tissue repair. In both of these processes, cells dissociate from neighboring cells and enter the bloodstream. In the bloodstream, c-Met-induced protection from apoptosis and ability to grow in an anchorage-independent manner allow the cells to survive until they extravasate, proliferate and eventually differentiate. In tissue repair, c-Met is involved in the process of epithelial-mesenchymal transition when epithelial cells adjacent to the injury detach, change shape and migrate toward the injured area where they proliferate and reconstitute the epithelial layer.

[0107] However, when c-Met is constitutively activated, the cells expressing it become tumorigenic and metastatic. Constitutive c-Met activation has been demonstrated to occur by multiple mechanisms. The most common is over-expression of the receptor, which occurs as a result of c-Met gene amplification (e.g., in colectoral tumors), enhanced c-Met transcription induced by other oncogenes, or hypoxia-activated transcription. Another mechanism includes c-Met gene structural alterations including point mutations (e.g., in hereditary papillary renal carcinomas, childhood hepatocellular carcinomas, sporadic papillary renal carcinomas, gastric carcinomas and head and neck squamous-cell carcinomas) and chromosomal translocations. Yet another mechanism includes c-Met structural alterations such as abnormal posttranslational processing, lack of cleavage of the precursor protein, mutations that prevent receptor downregulation and truncation of the receptor (e.g., in musculoskeletal tumors). Still another mechanism is HGF-dependent autocrine/paracrine activation. Paracrine activation can become pathological in the presence of abnormal HGF production by mesenchymal cells. Autocrine activation occurs when tumor cells aberrantly expression both c-Met and HGF (e.g., in osteosarcomas, rhabdomyosarcomas, gliomas and carcinomas of the thyroid, breast and lung). Finally, constitutive c-Met activation can also be caused by transactivation by other membrane receptors (e.g., RON, EGF-receptor family members, FAS and B plexins). See Corso et al., TRENDS Mol. Med. 11:284 (2005).

[0108] Anti-cancer strategies targeting the c-Met signaling pathway are also discussed in Corso et al., supra. These have included antagonism or neutralization of HGF, inhibition of c-Met kinase activity, prevention of c-Met dimerization, inhibition of c-Met intracellular activities, and silencing of c-Met or Hgf expression. Michielli et al., Cancer Cell, 6: 61-73 (2004) describe a soluble c-Met receptor, termed “decoy Met,” that interferes with both HGF binding to c-Met and c-Met homodimerization. Delivery of the decoy Met by a lentiviral vector in mice was reported to inhibit tumor cell proliferation and survival in human xenografts. Decoy Met was observed to impair tumor angiogenesis, suppress formation of spontaneous metastases, and synergize with radiotherapy in inducing tumor regression.

[0109] In some embodiments, binding domains of this disclosure comprise V_{H} and V_{L} domains specific for a HGF. In certain embodiments, the V_{H} and V_{L} domains are rodent (e.g., mouse, rat), humanized, or human. Examples of binding domains containing such V_{H} and V_{L} domains specific for HGF include, but are not limited to, those disclosed in US Patent Application Publication no. US 2005/0118643. Binding domains of this disclosure may also, or alternatively, comprise a cMet ectodomain of SEQ ID NO:750, 751 or 752, or a fragment thereof. In further embodiments, there are provided polypeptide binding domains specific for HGF, wherein the binding domain comprises a sequence that is at least 80%, at least 85%, at least 90%, at least 91%, at least 92%, at least 93%, at least 94%, at least 95%, at least 96%, at least 97%, at least 98%, at least 99%, at least 99.5%, or at least 100% identical to an amino acid sequence of SEQ ID NO:750, 751 or 752, wherein the polypeptide binding domain binds to HGF and inhibits the activity thereof.

[0110] In some embodiments, binding domains of this disclosure are c-Met antagonist domains that comprise V_{H} and V_{L} domains as described herein. In certain embodiments, the V_{H} and V_{L} domains are human. Examples of binding domains containing such V_{H} and V_{L} domains are set forth in SEQ ID NOS:1132-1184 and 1079-1131, respectively. In further embodiments, there are provided c-Met antagonist domains of this disclosure that have a sequence that is at least 90%, at least 91%, at least 92%, at least 93%, at least 94%, at least 95%, at least 96%, at least 97%, at least 98%, at least 99%, at least 99.5%, or at least 100% identical to the amino acid sequence of one or more light chain variable regions (V_{L}) or to one or more heavy chain variable regions (V_{H}), or both, as set forth in SEQ ID NOS:1079-1131 and 1132-1184, respectively, wherein each CDR has at most up to three amino acid changes.

[0111] In further embodiments, c-Met antagonist domains of this disclosure comprise V_{H} and V_{L} domains as set forth in SEQ ID NOS:1132-1184 and 1079-1131, respectively, which are at least 80%, at least 81%, at least 82%, at least 83%, at least 84%, at least 85%, at least 86%, at least 87%, at least 88%, at least 89%, at least 90%, at least 91%, at least 92%, at least 93%, at least 94%, at least 95%, at least 96%, at least 97%, at least 98%, at least 99%, or at least 99.5% identical to the amino acid sequence of such V_{H} domain, V_{L} domain, or both, wherein each CDR has no more than zero, one, two, or three mutations. For example, the amino acid sequence of a V_{H} domain, V_{L} domain, or both of this disclosure can be at least 80%, at least 81%, at least 82%, at least 83%, at least 84%, at least 85%, at least 86%, at least 87%, at least 88%, at least 89%, at least 90%, at least 91%, at least 92%, at least 93%, at least 94%, at least 95%, at least 96%, at least 97%, at least 98%, at least 99%, or at least 99.5% identical to the amino acid sequence of V_{H} domain (SEQ ID NO:1174), V_{L} domain (SEQ ID NO:1121), or both, respectively, from exemplary binding domain TRU(H)-343.

[0112] A binding domain of this disclosure can comprise a single CDR from a variable region of an anti-HGF or anti-c-Met, or it can comprise multiple CDRs that can be the same or different. In certain embodiments, binding domains of this disclosure comprise V_{H} and V_{L} domains specific for an HGF or c-Met comprising framework regions and CDR1, CDR2 and CDR3 regions, wherein (a) the V_{H} domain comprises an amino acid sequence of a heavy chain CDR3 found in any one of SEQ ID NOS:1132-1184; or (b) the V_{L} domain comprises an amino acid sequence of a light chain CDR3 found in any one of SEQ ID NOS:1079-1131; or (c) the binding domain comprises a V_{H} amino acid sequence of (a) and a V_{L} amino acid sequence of (b); or the binding domain comprises a V_{H} amino acid sequence of (a) and a V_{L} amino acid sequence of (b) and wherein the V_{H} and V_{L} are found in the same reference sequence. In further embodiments, binding domains of this disclosure comprise V_{H} and V_{L} domains specific for an HGF or c-Met comprising framework regions and CDR1, CDR2 and CDR3 regions, wherein (a) the V_{H} domain comprises an amino acid sequence of a heavy chain CDR1, CDR2, and CDR3 found in any one of SEQ ID NOS:1132-1184; or (b) the V_{L} domain comprises an amino acid sequence of a light chain CDR1, CDR2, and CDR3 found in any one of SEQ ID NOS:1079-1131; or (c) the binding domain comprises a V_{H} amino acid sequence of (a) and a V_{L} amino acid sequence of (b); or the binding domain comprises a V_{H} amino acid sequence of (a) and a V_{L} amino acid sequence of (b), wherein the V_{H} and V_{L} amino acid sequences are from the same reference sequence.

[0113] In any of the embodiments described herein comprising specific CDRs, a binding domain can comprise (i) a V_{H} domain having an amino acid sequence that is at least 80%, 85%, 90%, 91%, 92%, 93%, 94%, 95%, 96%, 97%, 98%, or 99% identical to the amino acid sequence of a V_{H} domain found in any one of SEQ ID NOS:1132-1184; or (ii) a V_{L} domain having an amino acid sequence that is at least 80%, 85%, 90%, 91%, 92%, 93%, 94%, 95%, 96%, 97%, 98%, or 99% identical to the amino acid sequence of a V_{L} domain found in any one of SEQ ID NOS:1079-1131; or (iii) both a V_{H} domain of (i) and a V_{L} domain of (ii); or both a V_{H} domain of (i) and a V_{L} domain of (ii) wherein the V_{H} and V_{L} are from the same reference sequence. Exemplary light and heavy chain variable domain CDRs directed against c-Met are provided in SEQ ID NO:762-920 and 921-1078, respectively.

[0114] Amino acid sequences of c-Met antagonist light chain and heavy chain variable regions are provided in SEQ ID NO:1079-1131 and 1132-1184, respectively.

### TWEAK Antagonists

[0115] In certain embodiments the present disclosure provides polypeptides containing a binding region or domain that is a TWEAK antagonist (i.e., can inhibit TWEAKR signaling). Exemplary TWEAK antagonists include binding domains specific for a TWEAK, such as an immunoglobulin variable binding domain or derivative thereof (e.g., an antibody, Fab, scFv, or the like), or a TWEAKR ectodomain or fragment thereof.

[0116] TWEAK is a cytokine that belongs to the tumor necrosis factor (TNF) ligand family and regulates multiple cellular responses including pro-inflammatory activity, angiogenesis and cell proliferation. TWEAK is a type II-transmembrane protein that is cleaved to generate a soluble cytokine with biological activity. The position of various domains within the TWEAK protein is shown, for example, in US Published Patent Application No. 2007/0280940. TWEAK has overlapping signaling functions with TNF, but displays a much wider tissue distribution. TWEAK can induce apoptosis via multiple pathways of cell death in a cell type-specific manner and has also been found to promote proliferation and migration of endothelial cells, and thus acts as a regulator of angiogenesis.

[0117] The cognate TWEAK receptor, TWEAKR or fibroblast growth factor-inducible 14 (Fn14), is a TNF receptor superfamily member expressed by non-lymphoid cell types (Wiley et al. (2001) Immunity 15:837). Expression of TWEAK and TWEAKR is relatively low in normal tissues but undergoes dramatic upregulation in settings of tissue injury and diseases. The TWEAK/R pathway facilitates acute tissue repair functions and thus functions physiologically after acute injury but functions pathologically in chronic inflammatory disease settings. In contrast to TNF, TWEAK plays no apparent role in development or homeostasis. A review of the TWEAK/R pathway is provided in Burkly et al. (2007) Cytokine 40:1. Persistently activated TWEAK promotes chronic inflammation, pathological hyperplasia and angiogenesis, and potentially impedes tissue repair by inhibiting differentiation of progenitor cells. TWEAK protein has been identified on the surface of activated monocytes and T cells and on tumor cell lines, and intracellularly in resting and activated monocytes, dendritic cells and NK cells. TWEAK expression is significantly increased locally in target tissues in contexts of acute injury, inflammatory disease and cancer, all of which are associated with infiltration of inflammatory cells and/or activation of resident innate immune cell types. Circulating TWEAK levels have been shown to be significantly increased in patients with chronic inflammatory diseases such as multiple sclerosis and systemic lupus erythematosus.

[0118] TWEAK blocking monoclonal antibodies have been shown to be effective in a mouse collagen-induced arthritis (CIA) model (Kamata et al. (2006) J. Immunol. 177:6433; Perper et al. (2006) J. Immunol. 177:2610). The arthritogenic activities of TWEAK and TNF on human synoviocytes are often additive or synergistic and appear independent of one another, indicating that TWEAK and TNF may act in parallel in pathology of rheumatoid arthritis. It has been speculated that the heterogeneity of RA patients with respect to their clinical response to TNF inhibitors may reflect a pathological contribution by TWEAK.

[0119] U.S. Pat. No. 7,169,387 describes the preparation of a monoclonal antibody specific for TWEAK and its use to block aspects of the development of graft-versus-host disease (GVHD) using a mouse model of chronic GVHD. US Patent Application Publication No. 2007/0280940 describes TWEAKR decoy receptors and antibodies against TWEAKR and TWEAK and their use in the treatment of central nervous system diseases associated with cerebral edema and cell death.

[0120] In some embodiments, binding domains of this disclosure comprise V_{H} and V_{L} domains specific for a TWEAK. In certain embodiments, the V_{H} and V_{L} domains are rodent (e.g., mouse, rat), humanized, or human. Examples of binding domains containing such V_{H} and V_{L} domains specific for TWEAK, include those disclosed, for example, in U.S. Pat. No. 7,169,387. Monoclonal antibodies that block TWEAK have been shown to be effective in a mouse collagen-induced arthritis (CIA) model (Kamata et al. (2006) J. Immunol. 177:6433; Perper et al. (2006) J. Immunol. 177:2610).

[0121] In certain embodiments, a TWEAK antagonist may be an extracellular domain (“ectodomain”) of a TWEAKR (also known as FN14). As used herein, a TWEAKR ectodomain refers to an extracellular portion of TWEAKR, a soluble TWEAKR, or any combination thereof. In certain embodiments, a TWEAK antagonist comprises an amino-terminal portion of TWEAKR, such as the first 70 amino acids of TWEAKR as set forth in GenBank Accession No. NP_{—}057723.1 (SEQ ID NO:761), or any fragment thereof that continues to function as a TWEAK antagonist. In other embodiments, a TWEAK antagonist comprises amino acids 28-70 of SEQ ID NO:761 (i.e., without the native leader sequence). In yet further embodiments, a TWEAK antagonist comprises a sequence that is at least 80%, at least 85%, at least 90%, at least 91%, at least 92%, at least 93%, at least 94%, at least 95%, at least 96%, at least 97%, at least 98%, at least 99%, at least 99.5%, or at least 100% identical to an amino acid sequence of SEQ ID NO:761, or amino acids 28-70 of SEQ ID NO:761, wherein the antagonist binds to TWEAK and inhibits the activity thereof.

[0122] The ability of binding proteins or fusion proteins described herein to reduce binding of TWEAK to TWEAKR may be determined using assays known to those of skill in the art including those described in US Patent Application Publication No. 2007/0280940.

### IGF Antagonists

[0123] As noted above, in certain embodiments the present disclosure provides polypeptides containing a binding region or domain that is an IGF1 or IGF2 antagonist (i.e., can inhibit IGF1 or IGF2 signaling). Exemplary IGF1 or IGF2 antagonists include binding domains specific for IGF1 or IGF2, such as an immunoglobulin variable binding domain or derivative thereof (e.g., an antibody, Fab, scFv, or the like), or an IGF1R or IGFBP ectodomain or sub-domain thereof.

[0124] The insulin-like growth factors (IGFs), comprise a family of peptides that play important roles in mammalian growth and development. Insulin-like growth factor 1 (IGF1) is a secreted protein that has the following features: disulfide bonds (amino acids 54-96, 66-109, 95-100); D peptide domain (amino acids 111-118); carboxyl-terminal propeptide domain (E peptide) (amino acids 119-153); insulin chain A-like domain (amino acids 90-110); insulin chain B-like domain (amino acids 49-77); insulin connecting C peptide-like domain (amino acids 78-89); propeptide domain (amino acids 22-48); and signal sequence domain (amino acids 1-21).

[0125] IGF1 is synthesized in multiple tissues including liver, skeletal muscle, bone and cartilage. The changes in blood concentrations of IGF1 reflect changes in its synthesis and secretion from the liver, which accounts for 80% of the total serum IGF1 in experimental animals. The remainder of the IGF1 is synthesized in the periphery, usually by connective tissue cell types, such as stromal cells that are present in most tissues. IGF1 that is synthesized in the periphery can function to regulate cell growth by autocrine and paracrine mechanisms. Within these tissues, the newly synthesized and secreted IGF1 can bind to receptors that are present either on the connective tissue cells themselves and stimulate growth (autocrine), or it can bind to receptors on adjacent cell types (often epithelial cell types) that do not actually synthesize IGF1 but are stimulated to grow by locally secreted IGF1 (paracrine) (Clemmons, 2007, Nat Rev Drug Discov. 6(10): 821-33). IGF1 synthesis is controlled by several factors, including the human pituitary growth hormone (GH, also known as somatotropin). IGF2 concentrations are high during fetal growth but are less GH-dependent in adult life compared with IGF1.

[0126] IGF1 enhances growth and/or survival of cells in a variety of tissues including musculoskeletal systems, liver, kidney, intestines, nervous system tissues, heart, and lung. IGF1 also has an important role in promoting cell growth and consequently IGF1 inhibition is being pursued as a potential adjunctive measure for treating atherosclerosis. Inhibiting IGF1 action has been proposed as a specific treatment either for potentiating the effects of other forms of anticancer therapies or for directly inhibiting tumor cell growth.

[0127] Like IGF1, IGF2 acts through IGF1R. IGF2 is an important autocrine growth factor in tumors due to its mitogenic and antiapoptotic functions (Kaneda et al., 2005, Cancer Res 65(24): 11236-11240). Increased expression of IGF2 is found frequently in a wide variety of malignancies, including colorectal, liver, esophageal and adrenocortical cancer, as well as sarcomas. Paracrine signaling by IGF2 also plays a role in tumors including breast cancers, as abundant expression of IGF2 is found in stromal fibroblasts surrounding malignant breast epithelial cells.

[0128] Insulin-like growth factor 1 receptor (IGF1R) is a tetramer of two alpha and two beta chains linked by disulfide bonds. Cleavage of a precursor generates the alpha and beta subunits. IGF1R is related to the protein kinase superfamily, the tyrosine protein kinase family, and the insulin receptor subfamily. It contains three fibronectin type-III domains, and one protein kinase domain (Lawrence et al., 2007, Current Opinion in Structural Biology 17: 699-705). The alpha chains contribute to the formation of the ligand-binding domain, while the beta chain carries a kinase domain. It is a single-pass type I membrane protein and is expressed in a variety of tissues.

[0129] The kinase domain has tyrosine-protein kinase activity, which is necessary for the activation of the IGF1- or IGF2-stimulated downstream signaling cascade. Auto-phosphorylation activates the kinase activity. IGF1R interacts with PIK3R1 and with the PTB/PID domains of IRS1 and SHC1 in vitro when autophosphorylated on tyrosine residues in the cytoplasmic domain of the beta subunit. IGF1R plays a critical role in transformation events. It is highly over-expressed in most malignant tissues where it functions as an anti-apoptotic agent by enhancing cell survival. Cells lacking this receptor cannot be transformed by most oncogenes, with the exception of v-Src.

[0130] The insulin-like growth factor-binding protein (IGFBP) family comprises six soluble proteins (IGFBP1-6) of approximately 250 residues that bind to IGFs with nanomolar affinities. Because of their sequence homology, IGFBPs are assumed to share a common overall fold and are expected to have closely related IGF-binding determinants. Each IGFBP can be divided into three distinct domains of approximately equal lengths: highly conserved cysteine-rich N and C domains and a central linker domain unique to each IGFBP species. Both the N and C domains participate in the binding to IGFs, although the specific roles of each of these domains in IGF binding have not been decisively determined. The C-terminal domain may be responsible for preferences of IGFBPs for one species of IGF over the other; the C-terminal domain is also involved in regulation of the IGF-binding affinity through interaction with extracellular matrix components and is most probably engaged in mediating IGF1-independent actions. The central linker domain is the least conserved region and has never been cited as part of the IGF-binding site for any IGFBP. This domain is the site of posttranslational modifications, specific proteolysis, and the acid-labile subunit and extracellular matrix associations known for IGFBPs. Proteolytic cleavage in this domain is believed to produce lower-affinity N- and C-terminal fragments that cannot compete with IGF receptors for IGFs, and, thus, the proteolysis is assumed to be the predominant mechanism for IGF release from IGFBPs. However, recent studies indicate that the resulting N- and C-terminal fragments still can inhibit IGF activity and have functional properties that differ from those of the intact proteins (Sitar et al. (2006) Proc. Natl. Acad. Sci. USA. 103(35):13028-33).

[0131] IGF-binding proteins are secreted proteins that prolong the half-life of the IGFs and have been shown to either inhibit or stimulate the growth promoting effects of the IGFs on cell culture. They alter the interaction of IGFs with their cell surface receptors and also promote cell migration. They bind equally well to IGF1 and IGF2. The C-terminal domains of all IGFBPs show sequence homology with thyroglobulin type-1 domains and share common elements of secondary structure: an α-helix and a 3- to 4-β-stranded β-sheet. The core of the molecule is connected by the consensus three disulfide pairings, has conserved Tyr/Phe amino acids and has the QC, CWCV motifs. These essential features are preserved in CBP1, CBP4, and CBP-6, the structures of C domains solved so far, although there are significant variations in detail. For example, CBP4 has helix α2, whereas the corresponding residues in CBP1 form a short beta-strand seen in other structures of the thyroglobulin type-1 domain superfamily. This particular region of CBPs has high sequence diversity and is involved in the IGF complex formation and thus may perform the role of an affinity regulator.

[0132] Inhibition of IGF/IGF-receptor binding interferes with cell growth and represents a strategy for the development of IGFBPs and variants as natural IGF antagonists in many common diseases that arise from disregulation of the IGF system, including diabetes, atherosclerosis, and cancer.

[0133] In some embodiments, binding domains of this disclosure comprise V_{H} and

[0134] V_{L} domains specific for IGF1 or IGF2. In certain embodiments, the V_{H} and V_{L} domains are rodent (e.g., mouse, rat), humanized, or human. Binding domains of this disclosure may also, or alternatively, comprise an IGF1R ectodomain of Genbank Accession no. NP_{—}000866.1 (SEQ ID NO:753) or a sub-domain thereof, or an IGFBP ectodomain of Genbank Accession no. NP_{—}000587.1 (IGFBP1; SEQ ID NO:754), NP_{—}000588.2 (IGFBP2; SEQ ID NO:755), NP_{—}001013416.1 (IGFBP3 isoform a; SEQ ID NO:756), NP_{—}000589.2 (IGFBP3 isoform b; SEQ ID NO:757), NP_{—}001543.2 (IGFBP4; SEQ ID NO:758), NP_{—}000590.1 (IGFBP5; SEQ ID NO:759) or NP_{—}002169.1 (IGFBP6; SEQ ID NO:760) or a sub-domain thereof. In yet further embodiments, an IGF1 or IGF2 antagonist comprises a sequence that is at least 80%, at least 85%, at least 90%, at least 91%, at least 92%, at least 93%, at least 94%, at least 95%, at least 96%, at least 97%, at least 98%, at least 99%, at least 99.5% or at least 100% identical to an amino acid sequence of SEQ ID NO:754-760, wherein the antagonist inhibits the activity of at least one or IGF1 and IGF2.

### Multi-Specific Fusion Proteins

[0135] The present disclosure provides multi-specific fusion proteins comprising a domain that is an antagonist of TGFβ (“TGFβ antagonist domain”) and a domain that is an antagonist or agonist of a ligand other than a TGFβ ligand (“heterologous binding domain”), such as an IL6 antagonist, IL10 antagonist, GITR agonist, VEGF antagonist, TNF antagonist, HGF antagonist, TWEAK antagonist, or IGF antagonist. It is contemplated that the TGFβ antagonist domain may be at the amino-terminus and the heterologous binding domain at the carboxy-terminus of a fusion protein, or the heterologous binding domain may be at the amino-terminus and the TGFβ antagonist may be at the carboxy-terminus. As set forth herein, the binding domains of this disclosure may be fused to each end of an intervening domain (e.g., an immunoglobulin constant region or sub-region thereof). Furthermore, the two or more binding domains may be each joined to an intervening domain via a linker known in the art or as described herein.

[0136] As used herein, an “intervening domain” refers to an amino acid sequence that simply functions as a scaffold for one or more binding domains so that the fusion protein will exist primarily (e.g., 50% or more of a population of fusion proteins) or substantially (e.g., 90% or more of a population of fusion proteins) as a single chain polypeptide in a composition. For example, certain intervening domains can have a structural function (e.g., spacing, flexibility, rigidity) or biological function (e.g., an increased half-life in plasma, such as in human blood). Exemplary intervening domains that can increase half-life of the fusion proteins of this disclosure in plasma include albumin, transferrin, a scaffold domain that binds a serum protein, or the like, or fragments thereof.

[0137] In certain preferred embodiments, the intervening domain contained in a multi-specific fusion protein of this disclosure is a “dimerization domain,” which refers to an amino acid sequence that is capable of promoting the association of at least two single chain polypeptides or proteins via non-covalent or covalent interactions, such as by hydrogen bonding, electrostatic interactions, Van der Waal's forces, disulfide bonds, hydrophobic interactions, or the like, or any combination thereof. Exemplary dimerization domains include immunoglobulin heavy chain constant regions or sub-regions. It should be understood that a dimerization domain can promote the formation of dimers or higher order multimer complexes (such as trimers, tetramers, pentamers, hexamers, septamers, octamers, etc.).

[0138] A “constant sub-region” is a term defined herein to refer to a peptide, polypeptide, or protein sequence that corresponds to or is derived from part or all of one or more immunoglobulin constant region domains, but does not contain all constant region domains found in a source antibody. In preferred embodiments, the constant region domains of a fusion protein of this disclosure contains a CH2 domain and a CH3 domain of IgG, IgA, or IgD, more preferably IgG1 CH2 and CH3, and even more preferably human IgG1 CH2 and CH3. In some embodiments, the constant region domains of a fusion protein of this disclosure lack or have minimal effector functions of antibody-dependent cell-mediated cytotoxicity (ADCC), antibody-dependent cell-mediated phagocytosis (ADCP), and complement activation and complement-dependent cytotoxicity (CDC), while retaining the ability to bind some F_{C} receptors (such as F_{C}Rn binding) and retaining a relatively long half life in vivo. In certain embodiments, a binding domain of this disclosure is fused to a human IgG1 constant region or sub-region, wherein the IgG1 constant region or sub-region has one or more of the following amino acids mutated: leucine at position 234 (L234), leucine at position 235 (L235), glycine at position 237 (G237), glutamate at position 318 (E318), lysine at position 320 (K320), lysine at position 322 (K322), or any combination thereof (EU numbering).

[0139] Methods are known in the art for making mutations inside or outside an Fc domain that can alter Fc interactions with Fc receptors (CD16, CD32, CD64, CD89, FcεR1, FcRn) or with the complement component C1q (see, e.g., U.S. Pat. No. 5,624,821; Presta (2002) Curr. Pharma. Biotechnol. 3:237). Particular embodiments of this disclosure include compositions comprising immunoglobulin or fusion proteins that have a constant region or sub-region from human IgG wherein binding to FcRn and protein A are preserved and wherein the Fc domain no longer interacts or minimally interacts with other Fc receptors or C1q. For example, a binding domain of this disclosure can be fused to a human IgG1 constant region or sub-region wherein the asparagine at position 297 (N297 under EU numbering) has been mutated to another amino acid to reduce or eliminate glycosylation at this site and, therefore, abrogate efficient Fc binding to FcγR and C1q. Another exemplary mutation is a P331S, which knocks out C1q binding but does not affect Fc binding.

[0140] In further embodiments, an immunoglobulin Fc region may have an altered glycosylation pattern relative to an immunoglobulin referent sequence. For example, any of a variety of genetic techniques may be employed to alter one or more particular amino acid residues that form a glycosylation site (see Co et al. (1993) Mol. Immunol. 30:1361; Jacquemon et al. (2006) J. Thromb. Haemost. 4:1047; Schuster et al. (2005) Cancer Res. 65:7934; Warnock et al. (2005) Biotechnol. Bioeng. 92:831). Alternatively, the host cells in which fusion proteins of this disclosure are produced may be engineered to produce an altered glycosylation pattern. One method known in the art, for example, provides altered glycosylation in the form of bisected, non-fucosylated variants that increase ADCC. The variants result from expression in a host cell containing an oligosaccharide-modifying enzyme. Alternatively, the Potelligent technology of BioWa/Kyowa Hakko is contemplated to reduce the fucose content of glycosylated molecules according to this disclosure. In one known method, a CHO host cell for recombinant immunoglobulin production is provided that modifies the glycosylation pattern of the immunoglobulin Fc region, through production of GDP-fucose.

[0141] Alternatively, chemical techniques are used to alter the glycosylation pattern of fusion proteins of this disclosure. For example, a variety of glycosidase and/or mannosidase inhibitors provide one or more of desired effects of increasing ADCC activity, increasing Fc receptor binding, and altering glycosylation pattern. In certain embodiment, cells expressing a multispecific fusion protein of the instant disclosure (containing a TGFβ antagonist domain linked to a IL6, IL6R, IL6xR, IL10, VEGF, TNF, HGF, TWEAK, IGF antagonist or to a GITR agonist) are grown in a culture medium comprising a carbohydrate modifier at a concentration that increases the ADCC of immunoglycoprotein molecules produced by said host cell, wherein said carbohydrate modifier is at a concentration of less than 800 μM. In a preferred embodiment, the cells expressing these multispecific fusion proteins are grown in a culture medium comprising castanospermine or kifunensine, more preferably castanospermine at a concentration of 100-800 μM, such as 100 μM, 200 μM, 300 μM, 400 μM, 500 μM, 600 μM, 700 μM, or 800 μM. Methods for altering glycosylation with a carbohydrate modifier such as castanospermine are provided in US Patent Application Publication No. 2009/0041756 or PCT Publication No. WO 2008/052030.

[0142] In another embodiment, the immunoglobulin Fc region may have amino acid modifications that affect binding to effector cell Fc receptors. These modifications can be made using any technique known in the art, such as the approach disclosed in Presta et al. (2001) Biochem. Soc. Trans. 30:487. In another approach, the Xencor XmAb technology is available to engineer constant sub-regions corresponding to Fc domains to enhance cell killing effector function (see Lazar et al. (2006) Proc. Nat'l. Acad. Sci. (USA) 103:4005). Using this approach, for example, one can generate constant sub-regions with improved specificity and binding for FCγR, thereby enhancing cell killing effector function.

[0143] In still further embodiments, a constant region or sub-region can optionally increase plasma half-life or placental transfer in comparison to a corresponding fusion protein lacking such an intervening domain. In certain embodiments, the extended plasma half-life of a fusion protein of this disclosure is at least two, at least three, at least four, at least five, at least ten, at least 12, at least 18, at least 20, at least 24, at least 30, at least 36, at least 40, at least 48 hours, at least several days, at least a week, at least two weeks, at least several weeks, at least a month, at least two months, at least several months, or more in a human.

[0144] A constant sub-region may include part or all of any of the following domains: a C_{H2} domain, a C_{H3} domain (IgA, IgD, IgG, IgE, or IgM), and a C_{H4} domain (IgE or IgM). A constant sub-region as defined herein, therefore, can refer to a polypeptide that corresponds to a portion of an immunoglobulin constant region. The constant sub-region may comprise a C_{H2} domain and a C_{H3} domain derived from the same, or different, immunoglobulins, antibody isotypes, or allelic variants. In some embodiments, the C_{H3} domain is truncated and comprises a carboxy-terminal sequence listed in PCT Publication No. WO 2007/146968 as SEQ ID NO:366-371, which sequences are hereby incorporated by reference. In certain embodiments, a constant sub-region of a polypeptide of this disclosure has a C_{H2} domain and C_{H3} domain, which may optionally have an amino-terminal linker, a carboxy-terminal linker, or a linker at both ends.

[0145] A “linker” is a peptide that joins or links other peptides or polypeptides, such as a linker of about 2 to about 150 amino acids. In fusion proteins of this disclosure, a linker can join an intervening domain (e.g., an immunoglobulin-derived constant sub-region) to a binding domain or a linker can join two variable regions of a binding domain. For example, a linker can be an amino acid sequence obtained, derived, or designed from an antibody hinge region sequence, a sequence linking a binding domain to a receptor, or a sequence linking a binding domain to a cell surface transmembrane region or membrane anchor. In some embodiments, a linker can have at least one cysteine capable of participating in at least one disulfide bond under physiological conditions or other standard peptide conditions (e.g., peptide purification conditions, conditions for peptide storage). In certain embodiments, a linker corresponding or similar to an immunoglobulin hinge peptide retains a cysteine that corresponds to the hinge cysteine disposed toward the amino-terminus of that hinge. In further embodiments, a linker is from an IgG1 or IgG2A hinge and has one cysteine or two cysteines corresponding to hinge cysteines. In certain embodiments, one or more disulfide bonds are formed as inter-chain disulfide bonds between intervening domains. In other embodiments, fusion proteins of this disclosure can have an intervening domain fused directly to a binding domain (i.e., absent a linker or hinge). In some embodiments, the intervening domain is a dimerization domain.

[0146] The intervening or dimerization domain of multi-specific fusion proteins of this disclosure may be connected to one or more terminal binding domains by a peptide linker. In addition to providing a spacing function, a linker can provide flexibility or rigidity suitable for properly orienting the one or more binding domains of a fusion protein, both within the fusion protein and between or among the fusion proteins and their target(s). Further, a linker can support expression of a full-length fusion protein and stability of the purified protein both in vitro and in vivo following administration to a subject in need thereof, such as a human, and is preferably non-immunogenic or poorly immunogenic in those same subjects. In certain embodiments, a linker of an intervening or a dimerization domain of multi-specific fusion proteins of this disclosure may comprise part or all of a human immunoglobulin hinge.

[0147] Additionally, a binding domain may comprise a V_{H} and a V_{L} domain, and these variable region domains may be combined by a linker. Exemplary variable region binding domain linkers include those belonging to the (GlyₙSer) family, such as (Gly₃Ser)ₙ(Gly₄Ser)₁, (Gly₃Ser)₁(Gly₄Ser)ₙ, (Gly₃Ser)ₙ(Gly₄Ser)ₙ, or (Gly₄Ser)ₙ, wherein n is an integer of 1 to 5 (see, e.g., Linkers 22, 29, 46, 89, 90, and 116 corresponding to SEQ ID NOS:518, 525, 542, 585, 586 and 603, respectively). In preferred embodiments, these (Gly₄Ser)-based linkers are used to link variable domains and are not used to link a binding domain (e.g., scFv) to an intervening domain (e.g., an IgG CH₂CH₃).

[0148] Exemplary linkers that can be used join an intervening domain (e.g., an immunoglobulin-derived constant sub-region) to a binding domain or to join two variable regions of a binding domain are provided in SEQ ID NO:497-604 and 1223-1228.

[0149] Linkers contemplated in this disclosure include, for example, peptides derived from any inter-domain region of an immunoglobulin superfamily member (e.g., an antibody hinge region) or a stalk region of C-type lectins, a family of type II membrane proteins. These linkers range in length from about two to about 150 amino acids, or about two to about 40 amino acids, or about eight to about 20 amino acids, preferably about ten to about 60 amino acids, more preferably about 10 to about 30 amino acids, and most preferably about 15 to about 25 amino acids. For example, Linker 1 (SEQ ID NO:497) is two amino acids in length and Linker 116 (SEQ ID NO:603) is 36 amino acids in length.

[0150] Beyond general length considerations, a linker suitable for use in the fusion proteins of this disclosure includes an antibody hinge region selected from an IgG hinge, IgA hinge, IgD hinge, IgE hinge, or variants thereof. In certain embodiments, a linker may be an antibody hinge region (upper and core region) selected from human IgG1, human IgG2, human IgG3, human IgG4, or fragments or variants thereof. As used herein, a linker that is an “immunoglobulin hinge region” refers to the amino acids found between the carboxyl end of CH1 and the amino terminal end of CH2 (for IgG, IgA, and IgD) or the amino terminal end of CH3 (for IgE and IgM). A “wild type immunoglobulin hinge region,” as used herein, refers to a naturally occurring amino acid sequence interposed between and connecting the CH1 and CH2 regions (for IgG, IgA, and IgD) or interposed between and connecting the CH2 and CH3 regions (for IgE and IgM) found in the heavy chain of an antibody. In preferred embodiments, the wild type immunoglobulin hinge region sequences are human.

[0151] According to crystallographic studies, an IgG hinge domain can be functionally and structurally subdivided into three regions: the upper hinge region, the core or middle hinge region, and the lower hinge region (Shin et al. (1992) Immunological Reviews 130:87). Exemplary upper hinge regions include EPKSCDKTHT (SEQ ID NO:1240) as found in IgG1, ERKCCVE (SEQ ID NO:1241) as found in IgG2, ELKTPLGDTT HT (SEQ ID NO:1242) or EPKSCDTPPP (SEQ ID NO:1243) as found in IgG3, and ESKYGPP (SEQ ID NO:1244) as found in IgG4. Exemplary middle hinge regions include CPPCP (SEQ ID NO:1245) as found in IgG1 and IgG2, CPRCP (SEQ ID NO:1246) as found in IgG3, and CPSCP (SEQ ID NO:1247) as found in IgG4. While IgG1, IgG2, and IgG4 antibodies each appear to have a single upper and middle hinge, IgG3 has four in tandem—one of ELKTPLGDTT HTCPRCP (SEQ ID NO:1248) and three of EPKSCDTPPP CPRCP (SEQ ID NO:1249).

[0152] IgA and IgD antibodies appear to lack an IgG-like core region, and IgD appears to have two upper hinge regions in tandem (see SEQ ID NOS:1250 and 1251). Exemplary wild type upper hinge regions found in IgA1 and IgA2 antibodies are set forth in SEQ ID NOS:1252 and 1253.

[0153] IgE and IgM antibodies, in contrast, instead of a typical hinge region have a CH2 region with hinge-like properties. Exemplary wild-type CH2 upper hinge-like sequences of IgE and IgM are set forth in SEQ ID NO:1254 (VCSRDFTPPT VKILQSSSDG GGHFPPTIQL LCLVSGYTPG TINITWLEDG QVMDVDLSTA STTQEGELAS TQSELTLSQK HWLSDRTYTC QVTYQGHTFE DSTKKCA) and SEQ ID NO:1255 (VIAELPPKVS VFVPPRDGFF GNPRKSKLIC QATGFSPRQI QVSWLREGKQ VGSGVTTDQV QAEAKESGPT TYKVTSTLTI KESDWLGQSM FTCRVDHRGL TFQQNASSMC VP), respectively.

[0154] An “altered wild type immunoglobulin hinge region” or “altered immunoglobulin hinge region” refers to (a) a wild type immunoglobulin hinge region with up to 30% amino acid changes (e.g., up to 25%, 20%, 15%, 10%, or 5% amino acid substitutions or deletions), (b) a portion of a wild type immunoglobulin hinge region that is at least 10 amino acids (e.g., at least 12, 13, 14 or 15 amino acids) in length with up to 30% amino acid changes (e.g., up to 25%, 20%, 15%, 10%, or 5% amino acid substitutions or deletions), or (c) a portion of a wild type immunoglobulin hinge region that comprises the core hinge region (which portion may be 4, 5, 6, 7, 8, 9, 10, 11, 12, 13, 14, or 15, or at least 4, 5, 6, 7, 8, 9, 10, 11, 12, 13, 14, or 15 amino acids in length). In certain embodiments, one or more cysteine residues in a wild type immunoglobulin hinge region may be substituted by one or more other amino acid residues (e.g., one or more serine residues). An altered immunoglobulin hinge region may alternatively or additionally have a proline residue of a wild type immunoglobulin hinge region substituted by another amino acid residue (e.g., a serine residue).

[0155] Alternative hinge and linker sequences that can be used as connecting regions may be crafted from portions of cell surface receptors that connect IgV-like or IgC-like domains. Regions between IgV-like domains where the cell surface receptor contains multiple IgV-like domains in tandem and between IgC-like domains where the cell surface receptor contains multiple tandem IgC-like regions could also be used as connecting regions or linker peptides. In certain embodiments, hinge and linker sequences are from five to 60 amino acids long, and may be primarily flexible, but may also provide more rigid characteristics, and may contain primarily an α-helical structure with minimal β-sheet structure. Preferably, sequences are stable in plasma and serum and are resistant to proteolytic cleavage. In some embodiments, sequences may contain a naturally occurring or added motif such as CPPC that confers the capacity to form a disulfide bond or multiple disulfide bonds to stabilize the C-terminus of the molecule. In other embodiments, sequences may contain one or more glycosylation sites. Examples of hinge and linker sequences include interdomain regions between the IgV-like and IgC-like or between the IgC-like or IgV-like domains of CD2, CD4, CD22, CD33, CD48, CD58, CD66, CD80, CD86, CD96, CD150, CD166, and CD244. Alternative hinges may also be crafted from disulfide-containing regions of Type II receptors from non-immunoglobulin superfamily members such as CD69, CD72, and CD161.

[0156] In some embodiments, a hinge linker has a single cysteine residue for formation of an interchain disulfide bond. In other embodiments, a linker has two cysteine residues for formation of interchain disulfide bonds. In further embodiments, a hinge linker is derived from an immunoglobulin interdomain region (e.g., an antibody hinge region comprising an upper and core sequence of, for example, an IgG1 hinge) or a Type II C-type lectin stalk region (derived from a Type II membrane protein; see, e.g., exemplary lectin stalk region sequences set forth in of PCT Application Publication No. WO 2007/146968, such as SEQ ID NOS:111, 113, 115, 117, 119, 121, 123, 125, 127, 129, 131, 133, 135, 149, 151, 153, 155, 157, 159, 161, 163, 165, 167, 169, 231, 233, 235, 237, 239, 241, 243, 245, 247, 249, 251, 253, 255, 257, 259, 261, 263, 265, 267, 269, 271, 273, 275, 277, 279, 281, 287, 289, 297, 305, 307, 309-311, 313-331, 346, 373-377, 380, or 381 from that publication), which sequences are herein incorporated by reference.

[0157] In one aspect, exemplary multi-specific fusion proteins containing a TGFβ antagonist as described herein will also contain at least one additional binding region or domain that is specific for a target other than TGFβ, such as an IL6, IL10, VEGF, TNF, HGF, TWEAK, IGF antagonist or a GITR agonist. For example, a multi-specific fusion protein of this disclosure has a TGFβ antagonist domain linked to an IL6, IL10, VEGF, TNF, HGF, TWEAK, IGF antagonist or a GITR agonist domain by an intervening domain (such as a human IgG1 CH2CH3 Fc region). In certain embodiments, a multi-specific fusion protein comprises a first and second binding domain, a first and second linker, and an intervening domain, wherein one end of the intervening domain is fused via the first linker to a first binding domain that is a TGFβ antagonist (e.g., a TGFβR2 ectodomain, an anti-TGFβR2 ectodomain, an anti-TGFβ) and at the other end is fused via the second linker to a different binding domain that is an IL6, IL10, VEGF, TNF, HGF, TWEAK, IGF antagonist or a GITR agonist.

[0158] In certain embodiments, the first linker and second linker of a multi-specific fusion protein of this disclosure are each independently selected from, for example, SEQ ID NO:497-604 and 1223-1228. For example, the first or second linker can be Linker 102 (SEQ ID NO:589), 47 (SEQ ID NO:543), 80 (SEQ ID NO:576), or any combination thereof. In further examples, one linker is Linker 102 (SEQ ID NO:589) and the other linker is Linker 47 (SEQ ID NO:543), or one linker is Linker 102 (SEQ ID NO:589) and the other linker is Linker 80 (SEQ ID NO:576). In further examples, binding domains of this disclosure that comprise V_{H} and V_{L} domains, such as those specific for IL6, IL6R, IL6xR, IL10, VEGF, TNF, HGF, TWEAK, IGF, GITR, TGFβR2 ectodomain, or TGFβ, can have a further (third) linker between the V_{H} and V_{L} domains, such as Linker 46 (SEQ ID NO:542). In any of these embodiments, the linkers may be flanked by one to five additional junction amino acids, which may simply be a result of creating such a recombinant molecule (e.g., use of a particular restriction enzyme site to join nucleic acid molecules may result in the insertion of one to several amino acids), or for purposes of this disclosure may be considered a part of any particular linker core sequence.

[0159] In further embodiments, the intervening domain of a multi-specific fusion protein of this disclosure is comprised of an immunoglobulin constant region or sub-region (preferably CH2CH3 of IgG, IgA, or IgD; or CH3CH4 of IgE or IgM), wherein the intervening domain is disposed between a TGFβ antagonist domain and an IL6, IL10, VEGF, TNF, HGF, TWEAK, IGF antagonist binding domain or a GITR agonist binding domain. In certain embodiments, the intervening domain of a multi-specific fusion protein of this disclosure has a TGFβ antagonist at the amino-terminus and a binding domain specific for an IL6, IL6xR, IL10, VEGF, TNF, HGF, TWEAK, IGF, or GITR at the carboxy-terminus. In other embodiments, the intervening domain of a multi-specific fusion protein of this disclosure has a binding domain specific for an IL6, IL10, VEGF, TNF, HGF, TWEAK, IGF antagonist binding domain or a GITR agonist binding domain at the amino-terminus and a TGFβ antagonist at the carboxy-terminus. In further embodiments, the immunoglobulin constant region sub-region includes CH2 and CH3 domains of immunoglobulin G1 (IgG1). In related embodiments, the IgG1 CH2 and CH3 domains have one or more of the following amino acids mutated (i.e., have a different amino acid at that position): leucine at position 234 (L234), leucine at position 235 (L235), glycine at position 237 (G237), glutamate at position 318 (E318), lysine at position 320 (K320), lysine at position 322 (K322), or any combination thereof (EU numbering). For example, any one of these amino acids can be changed to alanine. In a further embodiment, according to Kabat numbering, the CH2 domain has each of L234, L235, G237, E318, K320 and K322 mutated to an alanine (i.e., L234A, L235A, G237A, E318A, K320A and K322A, respectively).

[0160] In some embodiments, a multi-specific fusion protein of this disclosure has a TGFβ antagonist that comprises a TGFβR2 ectodomain or a sub-domain of a TGFβR2 ectodomain, or any combination thereof. For example, a TGFβ antagonist can comprise amino acids 73-176 as set forth in GenBank Accession No. NP_{—}001020018.1, amino acids 48-151 as set forth in GenBank Accession No. NP_{—}003233.4, or any combination thereof. In further embodiments, the TGFβ antagonist comprises an amino acid sequence as set forth in SEQ ID NO:743 or 744.

[0161] In further embodiments, a multi-specific fusion protein of this disclosure having a TGFβ antagonist of this disclosure also has an IL6 antagonist binding domain that binds with higher affinity to IL6xR than to either IL6 or IL6Rα alone and competes with sIL6xR complex binding to mgp130 or enhances sgp103 binding to sIL6xR complex. In certain embodiments, a binding domain specific for an IL6xR comprises (i) a V_{H} domain having an amino acid sequence that is at least 80%, 85%, 90%, 91%, 92%, 93%, 94%, 95%, 96%, 97%, 98%, 99% or 100% identical to the amino acid sequence of a V_{H} domain found in any one of SEQ ID NOS:435-496; or (ii) a V_{L} domain having an amino acid sequence that is at least 80%, 85%, 90%, 91%, 92%, 93%, 94%, 95%, 96%, 97%, 98%, 99% or 100% identical to the amino acid sequence of a V_{L} domain found in any one of SEQ ID NOS:373-434; or (iii) both a V_{H} domain of (i) and a V_{L} domain of (ii); or both a V_{H} domain of (i) and a V_{L} domain of (ii) wherein the V_{H} and V_{L} are from the same reference sequence. In one embodiment, such V_{H} and V_{L} domains can form exemplary binding domain TRUE-1019 (see SEQ ID NOS:453 and 391, respectively).

[0162] In still further embodiments, an IL6 antagonist binding domain, which binds to the IL6xR with a higher affinity than IL6 or IL6Rα or either IL6 or IL6Rα alone, and competes with gp130 for binding to the sIL6xR complex or enhances sgp130 binding to sIL6xR complex, comprises V_{H} and V_{L} domains comprising framework regions and CDR1, CDR2 and CDR3 regions, wherein (a) the V_{H} domain comprises the amino acid sequence of a heavy chain CDR1, CDR2, and CDR3 found in any one of SEQ ID NOS:435-496; or (b) the V_{L} domain comprises the amino acid sequence of a light chain CDR1, CDR2, and CDR3 found in any one of SEQ ID NOS:373-434; or (c) the binding domain comprises a V_{H} amino acid sequence of (a) and a V_{L} amino acid sequence of (b); or the binding domain comprises a V_{H} amino acid sequence of (a) and a V_{L} amino acid sequence of (b), wherein the V_{H} and V_{L} amino acid sequences are from the same reference sequence. The V_{L} and V_{H} domains of these multi-specific fusion proteins may be arranged in either orientation and may be separated by up to about a 5-30 amino acid linker as disclosed herein. In certain embodiments, a linker joining the V_{H} and V_{L} domains comprises an amino acid sequence of Linker 47 (SEQ ID NO:543) or Linker 80 (SEQ ID NO:576). In certain embodiments, a multi-specific fusion protein comprising the IL6 antagonist binding domain measurably inhibits IL6 cis- and trans-signaling, preferably trans-signaling and, optionally, does not inhibit signaling of gp130 family cytokines other than IL6.

[0163] Exemplary structures of such multi-specific fusion proteins, referred to herein as Xceptor molecules, include N-BD-X-ED-C, N-ED-X-BD-C, N-ED1-X-ED2-C, wherein BD is an immunoglobulin-like or immunoglobulin variable region binding domain, X is an intervening domain, and ED is a receptor ectodomain, or the like. In some constructs, X can comprise an immunoglobulin constant region or sub-region disposed between the first and second binding domains. In some embodiments, a multi-specific fusion protein of this disclosure has an intervening domain (X) comprising, from amino-terminus to carboxy-terminus, a structure as follows: -L1-X-L2-, wherein L1 and L2 are each independently a linker comprising from two to about 150 amino acids; and X is an immunoglobulin constant region or sub-region. In further embodiments, the multi-specific fusion protein will have an intervening domain that is albumin, transferrin, or another serum protein binding protein, wherein the fusion protein remains primarily or substantially as a single chain polypeptide in a composition. In still further embodiments, a multi-specific fusion protein of this disclosure has the following structure: N-BD1-X-L2-BD2-C, wherein N and C represent the amino-terminus and carboxy-terminus, respectively; BD1 is a TGFβ antagonist that is at least about 90% identical to an ectodomain of TGFβ2; —X— is -L1-CH2CH3-, wherein L1 is the first IgG1 hinge, optionally mutated by substituting the first cysteine and wherein —CH2CH3- is the CH2CH3 region of an IgG1 Fc domain, optionally mutated to eliminate FcγRI-III interaction while retaining FcRn interaction; L2 is a linker selected from SEQ ID NO:497-604 and 1223-1228; and BD2 is a binding domain specific for an IL6 or IL6/IL6R complex.

[0164] In particular embodiments, a multi-specific Xceptor fusion protein has (a) a TGFβ antagonist comprising an amino acid sequence at least 80% to 100% identical to a sequence as set forth in SEQ ID NO:743 or 744 and (b) an IL6 antagonist comprising a heavy chain variable region with CDR1, CD2, and CDR3 amino acid sequences at least 80% to 100% identical to sequences set forth in SEQ ID NOS:435-496, respectively, and a light chain variable region with CDR1, CDR2, and CDR3 amino acid sequences at least 80% to 100% identical to sequences set forth in SEQ ID NOS:373-434, respectively, wherein, from amino-terminus to carboxy-terminus or from carboxy-terminus to amino-terminus, (i) a TGFβ antagonist of (a) or an IL6 antagonist of (b) is fused to a first linker, (ii) the first linker is fused to an immunoglobulin heavy chain constant region of CH2 and CH3 comprising amino acids 276 to 489 of SEQ ID NO:625, (iii) the CH2CH3 constant region polypeptide is fused to a second linker, and (iv) the second linker is fused to a TGFβ antagonist of (a) or an IL6 antagonist of (b). In certain embodiments, the first linker is Linker 47 (SEQ ID NO:543) or Linker 80 (SEQ ID NO:576), the second linker is Linker 102 (SEQ ID NO:589), and a further (third) linker between the IL6 antagonist V_{H} and V_{L} domains is Linker 46 (SEQ ID NO:542).

[0165] In other embodiments, a multi-specific Xceptor fusion protein has (a) a TGFβ antagonist comprising an amino acid sequence at least 80% to 100% identical to a sequence as set forth in SEQ ID NO:743 or 744 and (b) an IL10 antagonist comprising an amino acid sequence at least 80% to 100% identical to an amino acid sequence of SEQ ID NO:745 or to amino acids 22-401 of SEQ ID NO:745, wherein, from amino-terminus to carboxy-terminus or from carboxy-terminus to amino-terminus, (i) a TGFβ antagonist of (a) or an IL10 antagonist of (b) is fused to a first linker, (ii) the first linker is fused to an immunoglobulin heavy chain constant region of CH2 and CH3, (iii) the CH2CH3 constant region polypeptide is fused to a second linker, and (iv) the second linker is fused to a TGFβ antagonist of (a) or an IL10 antagonist of (b). In certain embodiments, the first linker is Linker 47 (SEQ ID NO:543) or Linker 80 (SEQ ID NO:576), and the second linker is Linker 102 (SEQ ID NO:589).

[0166] In further embodiments, a multi-specific Xceptor fusion protein has (a) a TGFβ antagonist comprising an amino acid sequence at least 80% to 100% identical to a sequence as set forth in SEQ ID NO:743 or 744 and (b) a VEGF antagonist comprising an amino acid sequence at least 80% to 100% identical to an amino acid sequence of SEQ ID NO:747, wherein, from amino-terminus to carboxy-terminus or from carboxy-terminus to amino-terminus, (i) a TGFβ antagonist of (a) or a VEGF antagonist of (b) is fused to a first linker, (ii) the first linker is fused to an immunoglobulin heavy chain constant region of CH2 and CH3, (iii) the CH2CH3 constant region polypeptide is fused to a second linker, and (iv) the second linker is fused to a TGFβ antagonist of (a) or a VEGF antagonist of (b). In certain embodiments, the first linker is Linker 47 (SEQ ID NO:543) or Linker 80 (SEQ ID NO:576) and the second linker is Linker 102 (SEQ ID NO:589.

[0167] In further embodiments, a multi-specific Xceptor fusion protein has (a) a TGFβ antagonist comprising an amino acid sequence at least 80% to 100% identical to a sequence as set forth in SEQ ID NO:743 or 744 and (b) a TNFα antagonist comprising an amino acid sequence at least 80% to 100% identical to an amino acid sequence of SEQ ID NO:748 or 749, wherein, from amino-terminus to carboxy-terminus or from carboxy-terminus to amino-terminus, (i) a TGFβ antagonist of (a) or a TNFα antagonist of (b) is fused to a first linker, (ii) the first linker is fused to an immunoglobulin heavy chain constant region of CH2 and CH3, (iii) the CH2CH3 constant region polypeptide is fused to a second linker, and (iv) the second linker is fused to a TGFβ antagonist of (a) or a TNFα antagonist of (b). In certain embodiments, the first linker is Linker 47 (SEQ ID NO:543) or Linker 80 (SEQ ID NO:576), and the second linker is Linker 102 (SEQ ID NO:589). In specific embodiments, the multi-specific Xceptor fusion protein has an amino acid sequence of SEQ ID NO:1236.

[0168] In further embodiments, a multi-specific Xceptor fusion protein has (a) a TGFβ antagonist comprising an amino acid sequence at least 80% to 100% identical to a sequence as set forth in SEQ ID NO:743 or 744 and (b) a HGF antagonist comprising a heavy chain variable region with CDR1, CD2, and CDR3 amino acid sequences at least 80% to 100% identical to sequences set forth in SEQ ID NOS:921-1078, respectively, and a light chain variable region with CDR1, CDR2, and CDR3 amino acid sequences at least 80% to 100% identical to sequences set forth in SEQ ID NOS:762-920, respectively, wherein, from amino-terminus to carboxy-terminus or from carboxy-terminus to amino-terminus, (i) a TGFβ antagonist of (a) or a HGF antagonist of (b) is fused to a first linker, (ii) the first linker is fused to an immunoglobulin heavy chain constant region of CH2 and CH3, (iii) the CH2CH3 constant region polypeptide is fused to a second linker, and (iv) the second linker is fused to a TGFβ antagonist of (a) or a HGF antagonist of (b). In certain embodiments, the first linker is Linker 47 (SEQ ID NO:543) or Linker 80 (SEQ ID NO:576), the second linker is Linker 102 (SEQ ID NO:589), and a further (third) linker between the HGF antagonist V_{H} and V_{L} domains is Linker 46 (SEQ ID NO:542).

[0169] In yet other embodiments, a multi-specific Xceptor fusion protein has (a) a TGFβ antagonist comprising an amino acid sequence at least 80% to 100% identical to a sequence as set forth in SEQ ID NO:743 or 744 and (b) a TWEAK antagonist comprising an amino acid sequence at least 80% to 100% identical to an amino acid sequence of SEQ ID NO:761, wherein, from amino-terminus to carboxy-terminus or from carboxy-terminus to amino-terminus, (i) a TGFβ antagonist of (a) or a TWEAK antagonist of (b) is fused to a first linker, (ii) the first linker is fused to an immunoglobulin heavy chain constant region of CH2 and CH3, (iii) the CH2CH3 constant region polypeptide is fused to a second linker, and (iv) the second linker is fused to a TGFβ antagonist of (a) or a TWEAK antagonist of (b). In certain embodiments, the first linker is Linker 47 (SEQ ID NO:543) or Linker 80 (SEQ ID NO:576), and the second linker is Linker 102 (SEQ ID NO:589). In specific embodiments, the multi-specific Xceptor fusion protein has an amino acid sequence of SEQ ID NO:1237.

[0170] In yet other embodiments, a multi-specific Xceptor fusion protein has (a) a TGFβ antagonist comprising an amino acid sequence at least 80% to 100% identical to a sequence as set forth in SEQ ID NO:743 or 744 and (b) an IGF antagonist comprising an amino acid sequence at least 80% to 100% identical to an amino acid sequence of SEQ ID NO:754-760, wherein, from amino-terminus to carboxy-terminus or from carboxy-terminus to amino-terminus, (i) a TGFβ antagonist of (a) or an IGF antagonist of (b) is fused to a first linker, (ii) the first linker is fused to an immunoglobulin heavy chain constant region of CH2 and CH3, (iii) the CH2CH3 constant region polypeptide is fused to a second linker, and (iv) the second linker is fused to a TGFβ antagonist of (a) or an IGF antagonist of (b). In certain embodiments, the first linker is Linker 47 (SEQ ID NO:543) or Linker 80 (SEQ ID NO:576), and the second linker is Linker 102 (SEQ ID NO:589).

[0171] In other embodiments, a multi-specific Xceptor fusion protein has (a) a TGFβ antagonist comprising an amino acid sequence at least 80% to 100% identical to a sequence as set forth in SEQ ID NO:743 or 744 and (b) a GITR agonist comprising an amino acid sequence at least 80% to 100% identical to amino acids 74-181 of SEQ ID NO:746, wherein, from amino-terminus to carboxy-terminus or from carboxy-terminus to amino-terminus, (i) a TGFβ antagonist of (a) or a GITR agonist of (b) is fused to a first linker, (ii) the first linker is fused to an immunoglobulin heavy chain constant region of CH2 and CH3, (iii) the CH2CH3 constant region polypeptide is fused to a second linker, and (iv) the second linker is fused to a TGFβ antagonist of (a) or a GITR agonist of (b). In certain embodiments, the first linker is Linker 47 (SEQ ID NO:543) or Linker 80 (SEQ ID NO:576), and the second linker is Linker 102 (SEQ ID NO:589).

### Making Multi-Specific Fusion Proteins

[0172] To efficiently produce any of the binding domain polypeptides or fusion proteins described herein, a leader peptide is used to facilitate secretion of expressed polypeptides and fusion proteins. Using any of the conventional leader peptides (signal sequences) is expected to direct nascently expressed polypeptides or fusion proteins into a secretory pathway and to result in cleavage of the leader peptide from the mature polypeptide or fusion protein at or near the junction between the leader peptide and the polypeptide or fusion protein. A particular leader peptide will be chosen based on considerations known in the art, such as using sequences encoded by polynucleotides that allow the easy inclusion of restriction endonuclease cleavage sites at the beginning or end of the coding sequence for the leader peptide to facilitate molecular engineering, provided that such introduced sequences specify amino acids that either do not interfere unacceptably with any desired processing of the leader peptide from the nascently expressed protein or do not interfere unacceptably with any desired function of a polypeptide or fusion protein molecule if the leader peptide is not cleaved during maturation of the polypeptides or fusion proteins. Exemplary leader peptides of this disclosure include natural leader sequences (i.e., those expressed with the native protein) or use of heterologous leader sequences, such as H₃N-MDFQVQIFSFLLISASVIMSRG(X)ₙ—CO₂H, wherein X is any amino acid and n is zero to three (SEQ ID NO:1185) or H₃N-MEAPAQLLFLLLLWLPDTTG-CO₂H (SEQ ID NO:1186).

[0173] As noted herein, variants and derivatives of binding domains, such as ectodomains, light and heavy variable regions, and CDRs described herein, are contemplated. In one example, insertion variants are provided wherein one or more amino acid residues supplement a specific binding agent amino acid sequence. Insertions may be located at either or both termini of the protein, or may be positioned within internal regions of the specific binding agent amino acid sequence. Variant products of this disclosure also include mature specific binding agent products, i.e., specific binding agent products wherein a leader or signal sequence is removed, and the resulting protein having additional amino terminal residues. The additional amino terminal residues may be derived from another protein, or may include one or more residues that are not identifiable as being derived from a specific protein. Polypeptides with an additional methionine residue at position −1 are contemplated, as are polypeptides of this disclosure with additional methionine and lysine residues at positions −2 and −1. Variants having additional Met, Met-Lys, or Lys residues (or one or more basic residues in general) are particularly useful for enhanced recombinant protein production in bacterial host cells.

[0174] As used herein, “amino acids” refer to a natural (those occurring in nature) amino acid, a substituted natural amino acid, a non-natural amino acid, a substituted non-natural amino acid, or any combination thereof. The designations for natural amino acids are herein set forth as either the standard one- or three-letter code. Natural polar amino acids include asparagine (Asp or N) and glutamine (Gln or Q); as well as basic amino acids such as arginine (Arg or R), lysine (Lys or K), histidine (His or H), and derivatives thereof; and acidic amino acids such as aspartic acid (Asp or D) and glutamic acid (Glu or E), and derivatives thereof. Natural hydrophobic amino acids include tryptophan (Trp or W), phenylalanine (Phe or F), isoleucine (Ile or I), leucine (Leu or L), methionine (Met or M), valine (Val or V), and derivatives thereof; as well as other non-polar amino acids such as glycine (GIy or G), alanine (Ala or A), proline (Pro or P), and derivatives thereof. Natural amino acids of intermediate polarity include serine (Ser or S), threonine (Thr or T), tyrosine (Tyr or Y), cysteine (Cys or C), and derivatives thereof. Unless specified otherwise, any amino acid described herein may be in either the D- or L-configuration.

[0175] Substitution variants include those fusion proteins wherein one or more amino acid residues in an amino acid sequence are removed and replaced with alternative residues. In some embodiments, the substitutions are conservative in nature; however, this disclosure embraces substitutions that are also non-conservative. Amino acids can be classified according to physical properties and contribution to secondary and tertiary protein structure. A conservative substitution is recognized in the art as a substitution of one amino acid for another amino acid that has similar properties. Exemplary conservative substitutions are set out in Table 1 (see WO 97/09433, page 10, published Mar. 13, 1997), immediately below.

TABLE 1
Conservative Substitutions I

| Side Chain | Characteristic | Amino Acid |
|---|---|---|
| Aliphatic | Non-polar | G, A, P, I, L, V |
| | Polar - uncharged | S, T, M, N, Q |
| | Polar - charged | D, E, K, R |
| Aromatic | | H, F, W, Y |
| Other | | N, Q, D, E |

[0176] Alternatively, conservative amino acids can be grouped as described in Lehninger (Biochemistry, Second Edition; Worth Publishers, Inc. NY:NY (1975), pp. 71-77) as set out in Table 2, immediately below.

TABLE 2
Conservative Substitutions II

| Side Chain | Characteristic | Amino Acid |
|---|---|---|
| Non-polar (hydrophobic) | Aliphatic: | A, L, I, V, P |
| | Aromatic | F, W |
| | Sulfur-containing | M |
| | Borderline | G |
| Uncharged-polar | Hydroxyl | S, T, Y |
| | Amides | N, Q |
| | Sulfhydryl | C |
| | Borderline | G |
| Positively Charged (Basic) | | K, R, H |
| Negatively Charged (Acidic) | | D, E |

[0177] Variants or derivatives can also have additional amino acid residues which arise from use of specific expression systems. For example, use of commercially available vectors that express a desired polypeptide as part of a glutathione-S-transferase (GST) fusion product provides the desired polypeptide having an additional glycine residue at position −1 after cleavage of the GST component from the desired polypeptide. Variants which result from expression in other vector systems are also contemplated, including those wherein histidine tags are incorporated into the amino acid sequence, generally at the carboxy and/or amino terminus of the sequence.

[0178] Deletion variants are also contemplated wherein one or more amino acid residues in a binding domain of this disclosure are removed. Deletions can be effected at one or both termini of the fusion protein, or from removal of one or more residues within the amino acid sequence.

[0179] In certain illustrative embodiments, fusion proteins of this disclosure are glycosylated, the pattern of glycosylation being dependent upon a variety of factors including the host cell in which the protein is expressed (if prepared in recombinant host cells) and the culture conditions.

[0180] This disclosure also provides derivatives of fusion proteins. Derivatives include specific binding domain polypeptides bearing modifications other than insertion, deletion, or substitution of amino acid residues. In certain embodiments, the modifications are covalent in nature, and include for example, chemical bonding with polymers, lipids, other organic, and inorganic moieties. Derivatives of this disclosure may be prepared to increase circulating half-life of a specific binding domain polypeptide, or may be designed to improve targeting capacity for the polypeptide to desired cells, tissues, or organs.

[0181] This disclosure further embraces fusion proteins that are covalently modified or derivatized to include one or more water-soluble polymer attachments such as polyethylene glycol, polyoxyethylene glycol, or polypropylene glycol, as described U.S. Pat. Nos. 4,640,835; 4,496,689; 4,301,144; 4,670,417; 4,791,192 and 4,179,337. Still other useful polymers known in the art include monomethoxy-polyethylene glycol, dextran, cellulose, and other carbohydrate-based polymers, poly-(N-vinyl pyrrolidone)-polyethylene glycol, propylene glycol homopolymers, a polypropylene oxide/ethylene oxide co-polymer, polyoxyethylated polyols (e.g., glycerol) and polyvinyl alcohol, as well as mixtures of these polymers. Particularly preferred are polyethylene glycol (PEG)—derivatized proteins. Water-soluble polymers may be bonded at specific positions, for example at the amino terminus of the proteins and polypeptides according to this disclosure, or randomly attached to one or more side chains of the polypeptide. The use of PEG for improving therapeutic capacities is described in U.S. Pat. No. 6,133,426.

[0182] A particular embodiment of this disclosure is an immunoglobulin or an Fc fusion protein. Such a fusion protein can have a long half-life, e.g., several hours, a day or more, or even a week or more, especially if the Fc domain is capable of interacting with FcRn, the neonatal Fc receptor. The binding site for FcRn in an Fc domain is also the site at which the bacterial proteins A and G bind. The tight binding between these proteins can be used as a means to purify antibodies or fusion proteins of this disclosure by, for example, employing protein A or protein G affinity chromatography during protein purification.

[0183] Protein purification techniques are well known to those of skill in the art. These techniques involve, at one level, the crude fractionation of the polypeptide and non-polypeptide fractions. Further purification using chromatographic and electrophoretic techniques to achieve partial or complete purification (or purification to homogeneity) is frequently desired. Analytical methods particularly suited to the preparation of a pure fusion protein are ion-exchange chromatography; exclusion chromatography; polyacrylamide gel electrophoresis; and isoelectric focusing. Particularly efficient methods of purifying peptides are fast protein liquid chromatography and HPLC.

[0184] Certain aspects of the present disclosure concern the purification, and in particular embodiments, the substantial purification, of a fusion protein. The term “purified fusion protein” as used herein, is intended to refer to a composition, isolatable from other components, wherein the fusion protein is purified to any degree relative to its naturally obtainable state. A purified fusion protein therefore also refers to a fusion protein, free from the environment in which it may naturally occur.

[0185] Generally, “purified” will refer to a fusion protein composition that has been subjected to fractionation to remove various other components, and which composition substantially retains its expressed biological activity. Where the term “substantially purified” is used, this designation refers to a fusion binding protein composition in which the fusion protein forms the major component of the composition, such as constituting about 50%, about 60%, about 70%, about 80%, about 90%, about 95%, about 99% or more of the protein, by weight, in the composition.

[0186] Various methods for quantifying the degree of purification are known to those of skill in the art in light of the present disclosure. These include, for example, determining the specific binding activity of an active fraction, or assessing the amount of fusion protein in a fraction by SDS/PAGE analysis. A preferred method for assessing the purity of a protein fraction is to calculate the binding activity of the fraction, to compare it to the binding activity of the initial extract, and to thus calculate the degree of purification, herein assessed by a “-fold purification number.” The actual units used to represent the amount of binding activity will, of course, be dependent upon the particular assay technique chosen to follow the purification and whether or not the expressed fusion protein exhibits a detectable binding activity.

[0187] Various techniques suitable for use in protein purification are well known to those of skill in the art. These include, for example, precipitation with ammonium sulfate, PEG, antibodies and the like, or by heat denaturation, followed by centrifugation; chromatography steps such as ion exchange, gel filtration, reverse phase, hydroxylapatite, and affinity chromatography; isoelectric focusing; gel electrophoresis; and combinations of these and other techniques. As is generally known in the art, it is believed that the order of conducting the various purification steps may be changed, or that certain steps may be omitted, and still result in a suitable method for the preparation of a substantially purified protein.

[0188] There is no general requirement that the fusion protein always be provided in its most purified state. Indeed, it is contemplated that less substantially purified proteins will have utility in certain embodiments. Partial purification may be accomplished by using fewer purification steps in combination, or by utilizing different forms of the same general purification scheme. For example, it is appreciated that a cation-exchange column chromatography performed utilizing an HPLC apparatus will generally result in greater purification than the same technique utilizing a low pressure chromatography system. Methods exhibiting a lower degree of relative purification may have advantages in total recovery of protein product, or in maintaining binding activity of an expressed protein.

[0189] It is known that the migration of a polypeptide can vary, sometimes significantly, with different conditions of SDS/PAGE (Capaldi et al. (1977) Biochem. Biophys. Res. Comm. 76:425). It will therefore be appreciated that under differing electrophoresis conditions, the apparent molecular weights of purified or partially purified fusion protein expression products may vary.

### Polynucleotides, Expression Vectors, and Host Cells

[0190] This disclosure provides polynucleotides (isolated or purified or pure polynucleotides) encoding the multi-specific fusion protein of this disclosure, vectors (including cloning vectors and expression vectors) comprising such polynucleotides, and cells (e.g., host cells) transformed or transfected with a polynucleotide or vector according to this disclosure.

[0191] In certain embodiments, a polynucleotide (DNA or RNA) encoding a binding domain of this disclosure, or a multi-specific fusion protein containing one or more such binding domains is contemplated. Expression cassettes encoding multi-specific fusion protein constructs are provided in the examples appended hereto.

[0192] The present disclosure also relates to vectors that include a polynucleotide of this disclosure and, in particular, to recombinant expression constructs. In one embodiment, this disclosure contemplates a vector comprising a polynucleotide encoding a multi-specific fusion protein containing a TGFβ antagonist domain and an IL6 or IL6/IL6R binding domain of this disclosure, along with other polynucleotide sequences that cause or facilitate transcription, translation, and processing of such multi-specific fusion protein-encoding sequences.

[0193] Appropriate cloning and expression vectors for use with prokaryotic and eukaryotic hosts are described, for example, in Sambrook et al., Molecular Cloning: A Laboratory Manual, Second Edition, Cold Spring Harbor, N.Y., (1989). Exemplary cloning/expression vectors include cloning vectors, shuttle vectors, and expression constructs, that may be based on plasmids, phagemids, phasmids, cosmids, viruses, artificial chromosomes, or any nucleic acid vehicle known in the art suitable for amplification, transfer, and/or expression of a polynucleotide contained therein

[0194] As used herein, “vector” means a nucleic acid molecule capable of transporting another nucleic acid to which it has been linked. Exemplary vectors include plasmids, yeast artificial chromosomes, and viral genomes. Certain vectors can autonomously replicate in a host cell, while other vectors can be integrated into the genome of a host cell and thereby are replicated with the host genome. In addition, certain vectors are referred to herein as “recombinant expression vectors” (or simply, “expression vectors”), which contain nucleic acid sequences that are operatively linked to an expression control sequence and, therefore, are capable of directing the expression of those sequences.

[0195] In certain embodiments, expression constructs are derived from plasmid vectors. Illustrative constructs include modified pNASS vector (Clontech, Palo Alto, Calif.), which has nucleic acid sequences encoding an ampicillin resistance gene, a polyadenylation signal and a T7 promoter site; pDEF38 and pNEF38 (CMC ICOS Biologics, Inc.), which have a CHEF1 promoter; and pD18 (Lonza), which has a CMV promoter. Other suitable mammalian expression vectors are well known (see, e.g., Ausubel et al., 1995; Sambrook et al., supra; see also, e.g., catalogs from Invitrogen, San Diego, Calif.; Novagen, Madison, Wis.; Pharmacia, Piscataway, N.J.). Useful constructs may be prepared that include a dihydrofolate reductase (DHFR)-encoding sequence under suitable regulatory control, for promoting enhanced production levels of the fusion proteins, which levels result from gene amplification following application of an appropriate selection agent (e.g., methotrexate).

[0196] Generally, recombinant expression vectors will include origins of replication and selectable markers permitting transformation of the host cell, and a promoter derived from a highly-expressed gene to direct transcription of a downstream structural sequence, as described above. A vector in operable linkage with a polynucleotide according to this disclosure yields a cloning or expression construct. Exemplary cloning/expression constructs contain at least one expression control element, e.g., a promoter, operably linked to a polynucleotide of this disclosure. Additional expression control elements, such as enhancers, factor-specific binding sites, terminators, and ribosome binding sites are also contemplated in the vectors and cloning/expression constructs according to this disclosure. The heterologous structural sequence of the polynucleotide according to this disclosure is assembled in appropriate phase with translation initiation and termination sequences. Thus, for example, the fusion protein-encoding nucleic acids as provided herein may be included in any one of a variety of expression vector constructs as a recombinant expression construct for expressing such a protein in a host cell.

[0197] The appropriate DNA sequence(s) may be inserted into a vector, for example, by a variety of procedures. In general, a DNA sequence is inserted into an appropriate restriction endonuclease cleavage site(s) by procedures known in the art. Standard techniques for cloning, DNA isolation, amplification and purification, for enzymatic reactions involving DNA ligase, DNA polymerase, restriction endonucleases and the like, and various separation techniques are contemplated. A number of standard techniques are described, for example, in Ausubel et al. (Current Protocols in Molecular Biology, Greene Publ. Assoc. Inc. & John Wiley & Sons, Inc., Boston, Mass., 1993); Sambrook et al. (Molecular Cloning, Second Ed., Cold Spring Harbor Laboratory, Plainview, N.Y., 1989); Maniatis et al. (Molecular Cloning, Cold Spring Harbor Laboratory, Plainview, N.Y., 1982); Glover (Ed.) (DNA Cloning Vol. I and II, IRL Press, Oxford, UK, 1985); Hames and Higgins (Eds.) (Nucleic Acid Hybridization, IRL Press, Oxford, UK, 1985); and elsewhere.

[0198] The DNA sequence in the expression vector is operatively linked to at least one appropriate expression control sequence (e.g., a constitutive promoter or a regulated promoter) to direct mRNA synthesis. Representative examples of such expression control sequences include promoters of eukaryotic cells or their viruses, as described above. Promoter regions can be selected from any desired gene using CAT (chloramphenicol transferase) vectors or other vectors with selectable markers. Eukaryotic promoters include CMV immediate early, HSV thymidine kinase, early and late SV40, LTRs from retrovirus, and mouse metallothionein-I. Selection of the appropriate vector and promoter is well within the level of ordinary skill in the art, and preparation of certain particularly preferred recombinant expression constructs comprising at least one promoter or regulated promoter operably linked to a nucleic acid encoding a protein or polypeptide according to this disclosure is described herein.

[0199] Variants of the polynucleotides of this disclosure are also contemplated. Variant polynucleotides are at least 90%, and preferably 95%, 99%, or 99.9% identical to one of the polynucleotides of defined sequence as described herein, or that hybridizes to one of those polynucleotides of defined sequence under stringent hybridization conditions of 0.015M sodium chloride, 0.0015M sodium citrate at about 65-68° C. or 0.015M sodium chloride, 0.0015M sodium citrate, and 50% formamide at about 42° C. The polynucleotide variants retain the capacity to encode a binding domain or fusion protein thereof having the functionality described herein.

[0200] The term “stringent” is used to refer to conditions that are commonly understood in the art as stringent. Hybridization stringency is principally determined by temperature, ionic strength, and the concentration of denaturing agents such as formamide. Examples of stringent conditions for hybridization and washing are 0.015M sodium chloride, 0.0015M sodium citrate at about 65-68° C. or 0.015M sodium chloride, 0.0015M sodium citrate, and 50% formamide at about 42° C. (see Sambrook et al., Molecular Cloning: A Laboratory Manual, 2nd Ed., Cold Spring Harbor Laboratory, Cold Spring Harbor, N.Y., 1989).

[0201] More stringent conditions (such as higher temperature, lower ionic strength, higher formamide, or other denaturing agent) may also be used; however, the rate of hybridization will be affected. In instances wherein hybridization of deoxyoligonucleotides is concerned, additional exemplary stringent hybridization conditions include washing in 6×SSC, 0.05% sodium pyrophosphate at 37° C. (for 14-base oligonucleotides), 48° C. (for 17-base oligonucleotides), 55° C. (for 20-base oligonucleotides), and 60° C. (for 23-base oligonucleotides).

[0202] A further aspect of this disclosure provides a host cell transformed or transfected with, or otherwise containing, any of the polynucleotides or vector/expression constructs of this disclosure. The polynucleotides or cloning/expression constructs of this disclosure are introduced into suitable cells using any method known in the art, including transformation, transfection and transduction. Host cells include the cells of a subject undergoing ex vivo cell therapy including, for example, ex vivo gene therapy. Eukaryotic host cells contemplated as an aspect of this disclosure when harboring a polynucleotide, vector, or protein according to this disclosure include, in addition to a subject's own cells (e.g., a human patient's own cells), VERO cells, HeLa cells, Chinese hamster ovary (CHO) cell lines (including modified CHO cells capable of modifying the glycosylation pattern of expressed multivalent binding molecules, see US Patent Application Publication No. 2003/0115614), COS cells (such as COS-7), W138, BHK, HepG2, 3T3, RIN, MDCK, A549, PC12, K562, HEK293 cells, HepG2 cells, N cells, 3T3 cells, Spodoptera frugiperda cells (e.g., Sf9 cells), Saccharomyces cerevisiae cells, and any other eukaryotic cell known in the art to be useful in expressing, and optionally isolating, a protein or peptide according to this disclosure. Also contemplated are prokaryotic cells, including Escherichia coli, Bacillus subtilis, Salmonella typhimurium, a Streptomycete, or any prokaryotic cell known in the art to be suitable for expressing, and optionally isolating, a protein or peptide according to this disclosure. In isolating protein or peptide from prokaryotic cells, in particular, it is contemplated that techniques known in the art for extracting protein from inclusion bodies may be used. The selection of an appropriate host is within the scope of those skilled in the art from the teachings herein. Host cells that glycosylate the fusion proteins of this disclosure are contemplated.

[0203] The term “recombinant host cell” (or simply “host cell”) refers to a cell containing a recombinant expression vector. It should be understood that such terms are intended to refer not only to the particular subject cell but to the progeny of such a cell. Because certain modifications may occur in succeeding generations due to either mutation or environmental influences, such progeny may not, in fact, be identical to the parent cell, but are still included within the scope of the term “host cell” as used herein.

[0204] Recombinant host cells can be cultured in a conventional nutrient medium modified as appropriate for activating promoters, selecting transformants, or amplifying particular genes. The culture conditions for particular host cells selected for expression, such as temperature, pH and the like, will be readily apparent to the ordinarily skilled artisan. Various mammalian cell culture systems can also be employed to express recombinant protein. Examples of mammalian expression systems include the COS-7 lines of monkey kidney fibroblasts, described by Gluzman (1981) Cell 23:175, and other cell lines capable of expressing a compatible vector, for example, the C127, 3T3, CHO, HeLa and BHK cell lines. Mammalian expression vectors will comprise an origin of replication, a suitable promoter and, optionally, enhancer, and also any necessary ribosome binding sites, polyadenylation site, splice donor and acceptor sites, transcriptional termination sequences, and 5′-flanking nontranscribed sequences, for example, as described herein regarding the preparation of multivalent binding protein expression constructs. DNA sequences derived from the SV40 splice, and polyadenylation sites may be used to provide the required nontranscribed genetic elements. Introduction of the construct into the host cell can be effected by a variety of methods with which those skilled in the art will be familiar, including calcium phosphate transfection, DEAE-Dextran-mediated transfection, or electroporation (Davis et al. (1986) Basic Methods in Molecular Biology).

[0205] In one embodiment, a host cell is transduced by a recombinant viral construct directing the expression of a protein or polypeptide according to this disclosure. The transduced host cell produces viral particles containing expressed protein or polypeptide derived from portions of a host cell membrane incorporated by the viral particles during viral budding.

### Compositions and Methods of Use

[0206] To treat human or non-human mammals suffering a disease state associated with TGFβ, IL6, IL10, GITR, VEGF, TNF, HGF, TWEAK, IGF1 or IGF2 dysregulation, a multi-specific fusion protein of this disclosure is administered to the subject in an amount that is effective to ameliorate symptoms of the disease state following a course of one or more administrations. Being polypeptides, the multi-specific fusion proteins of this disclosure can be suspended or dissolved in a pharmaceutically acceptable diluent, optionally including a stabilizer of other pharmaceutically acceptable excipients, which can be used for intravenous administration by injection or infusion, as more fully discussed below.

[0207] A pharmaceutically effective dose is that dose required to prevent, inhibit the occurrence of, or treat (alleviate a symptom to some extent, preferably all symptoms of) a disease state. The pharmaceutically effective dose depends on the type of disease, the composition used, the route of administration, the type of subject being treated, the physical characteristics of the specific subject under consideration for treatment, concurrent medication, and other factors that those skilled in the medical arts will recognize. For example, an amount between 0.1 mg/kg and 100 mg/kg body weight (which can be administered as a single dose, or in multiple doses given hourly, daily, weekly, monthly, or any combination thereof that is an appropriate interval) of active ingredient may be administered depending on the potency of a binding domain polypeptide or multi-specific protein fusion of this disclosure.

[0208] In certain aspects, compositions of fusion proteins are provided by this disclosure. Pharmaceutical compositions of this disclosure generally comprise one or more type of binding domain or fusion protein in combination with a pharmaceutically acceptable carrier, excipient, or diluent. Such carriers will be nontoxic to recipients at the dosages and concentrations employed. Pharmaceutically acceptable carriers for therapeutic use are well known in the pharmaceutical art, and are described, for example, in Remington's Pharmaceutical Sciences, Mack Publishing Co. (A. R. Gennaro (Ed.) 1985). For example, sterile saline and phosphate buffered saline at physiological pH may be used. Preservatives, stabilizers, dyes and the like may be provided in the pharmaceutical composition. For example, sodium benzoate, sorbic acid, or esters of p-hydroxybenzoic acid may be added as preservatives. Id. at 1449. In addition, antioxidants and suspending agents may be used. Id. The compounds of the present invention may be used in either the free base or salt forms, with both forms being considered as being within the scope of the present invention.

[0209] Pharmaceutical compositions may also contain diluents such as buffers; antioxidants such as ascorbic acid, low molecular weight (less than about 10 residues) polypeptides, proteins, amino acids, carbohydrates (e.g., glucose, sucrose, or dextrins), chelating agents (e.g., EDTA), glutathione or other stabilizers or excipients. Neutral buffered saline or saline mixed with nonspecific serum albumin are exemplary appropriate diluents. Preferably, product is formulated as a lyophilizate using appropriate excipient solutions as diluents.

[0210] Compositions of this disclosure can be used to treat disease states in human and non-human mammals that are a result of or associated with TGFβ or IL6 dysregulation. Increased production or activity of TGFβ has been implicated in various disease processes, including tumorigenesis, angiogenesis, metastasis, metastatic migration, and epithelial and mesenchymal cancers (see, e.g., Oft et al. (1998) Curr. Biol. 8:1243; Pardali & Mousaka (2007) Biochim. Biophys. Acta 1775:21). In addition, TGFβ signal transduction has been associated with angiogenesis and the development of vascular disorders (Bertolino et al. (2005) Chest 128:585 S).

[0211] It has been suggested that IL10 may play a key role in the occurrence of lyphocytic diseases (U.S. Pat. No. 5,639,600) and that IL10 may increase proliferation of non-Hodgkin's lymphoma cells (Voorzanger et al. (1996) Cancer Res. 56:5499). More recently it has been proposed that TGFβ and IL10 work together to ensure a controlled inflammatory response (Li & Flavell, (2008) Immunity 28:468). It has been suggested that tumor-expressed GITRL mediates immunosubversion in humans (Baltz et al. (2007) FASEB J. 21:2442). Overexpression of VEGF and TGFβ has been associated with the development of cervical cancer (Baritaki et al. (2007) Int. J. Oncol. 31:69). TNFα has been associated with the development of renal cell carcinoma (Harrison et al. (2007) J. Clin. Oncol. 25:4542-9). TGFβ has been shown to promote HGF-dependent invasion of squamous carcinoma cells (Lewis et al. (2004) Br. J. Cancer, 90:822), and HGF has been shown to stimulate cell growth and enhance expression of TGFα in human pancreatic cancer cells (Ohba et al. (1999) J. Gastroenterol. 34:498-504). In addition, TGFβ and HGF have been shown to stimulate the invasivenss of gastric cancer cells (Inoue et al., (197) Jpn. J. Cancer Res. 88:152). IGF1R has been identified in the treatment of cancers, including sarcomas (Scotlandi & Picci (2008) Curr. Opin. Oncol. 20:419-27; Yuen & Macaulay (2008) Expert Opin. Ther. Targets 12:589-603).

[0212] IL-6 trans-signaling has been implicated in malignancies, such as colon cancer, while IL6 cis-signaling has been implicated in malignancies including hormone-independent prostate cancer, B-cell proliferative disorders such as B cell non-Hodgkin's lymphoma, and advanced cancers of kidney, breast, colon, lung, brain, and other tissues (see, e.g., Sansone et al. (2007) J. Clin Invest. 117:3988). Thus, multi-specific fusion proteins of this disclosure are useful in treating various TGFβ related autoimmune disorders (such as systemic lupus erythematosus (SLE) or rheumatoid arthritis), Alzheimer's disease or hyperproliferative diseases or malignant disorders, including polycystic kidney disease, lung cancer, colon cancer, urothelial cancer, bladder cancer, renal cell cancer, breast cancer, ovarian cancer, Rhabdomyosarcoma, Ewing's sarcoma, osteosarcoma, neuroblastoma, head & neck cancer, melanoma, glioblastoma, pancreatic cancer, or hepatocarcinoma, or the like.

[0213] “Pharmaceutically acceptable salt” refers to a salt of a binding domain polypeptide or fusion protein of this disclosure that is pharmaceutically acceptable and that possesses the desired pharmacological activity of the parent compound. Such salts include the following: (1) acid addition salts, formed with inorganic acids such as hydrochloric acid, hydrobromic acid, sulfuric acid, nitric acid, phosphoric acid, and the like; or formed with organic acids such as acetic acid, propionic acid, hexanoic acid, cyclopentanepropionic acid, glycolic acid, pyruvic acid, lactic acid, malonic acid, succinic acid, malic acid, maleic acid, fumaric acid, tartaric acid, citric acid, benzoic acid, 3-(4-hydroxybenzoyl)benzoic acid, cinnamic acid, mandelic acid, methanesulfonic acid, ethanesulfonic acid, 1,2-ethane-disulfonic acid, 2-hydroxyethanesulfonic acid, benzenesulfonic acid, 4-chlorobenzenesulfonic acid, 2-naphthalenesulfonic acid, 4-toluenesulfonic acid, camphorsulfonic acid, 4-methylbicyclo[2.2.2]-oct-2-ene-1-carboxylic acid, glucoheptonic acid, 3-phenylpropionic acid, trimethylacetic acid, tertiary butylacetic acid, lauryl sulfuric acid, gluconic acid, glutamic acid, hydroxynaphthoic acid, salicylic acid, stearic acid, muconic acid, and the like; or (2) salts formed when an acidic proton present in the parent compound either is replaced by a metal ion, e.g., an alkali metal ion, an alkaline earth ion, or an aluminum ion; or coordinates with an organic base such as ethanolamine, diethanolamine, triethanolamine, N-methylglucamine, or the like.

[0214] In particular illustrative embodiments, a polypeptide or fusion protein of this disclosure is administered intravenously by, for example, bolus injection or infusion. Routes of administration in addition to intravenous include oral, topical, parenteral (e.g., sublingually or buccally), sublingual, rectal, vaginal, and intranasal. The term parenteral as used herein includes subcutaneous injections, intravenous, intramuscular, intrasternal, intracavernous, intrathecal, intrameatal, intraurethral injection, perispinal or infusion techniques. The pharmaceutical composition is formulated so as to allow the active ingredients contained therein to be bioavailable upon administration of the composition to a patient. Compositions that will be administered to a patient take the form of one or more dosage units, where for example, a tablet may be a single dosage unit, and a container of one or more compounds of this disclosure in aerosol form may hold a plurality of dosage units.

[0215] For oral administration, an excipient and/or binder may be present, such as sucrose, kaolin, glycerin, starch dextrans, cyclodextrins, sodium alginate, ethyl cellulose, and carboxy methylcellulose. Sweetening agents, preservatives, dye/colorant, flavor enhancer, or any combination thereof may optionally be present. A coating shell may also optionally be used.

[0216] In a composition intended to be administered by injection, one or more of a surfactant, preservative, wetting agent, dispersing agent, suspending agent, buffer, stabilizer, isotonic agent, or any combination thereof may optionally be included.

[0217] For nucleic acid-based formulations, or for formulations comprising expression products according to this disclosure, about 0.01 μg/kg to about 100 mg/kg body weight will be administered, for example, by the intradermal, subcutaneous, intramuscular, or intravenous route, or by any route known in the art to be suitable under a given set of circumstances. A preferred dosage, for example, is about 1 μg/kg to about 20 mg/kg, with about 5 μg/kg to about 10 mg/kg particularly preferred. It will be evident to those skilled in the art that the number and frequency of administration will be dependent upon the response of the host.

[0218] The pharmaceutical compositions of this disclosure may be in any form that allows for administration to a patient, such as, for example, in the form of a solid, liquid, or gas (aerosol). The composition may be in the form of a liquid, e.g., an elixir, syrup, solution, emulsion or suspension, for administration by any route described herein.

[0219] A liquid pharmaceutical composition as used herein, whether in the form of a solution, suspension or other like form, may include one or more of the following components: sterile diluents such as water for injection, saline solution (e.g., physiological saline), Ringer's solution, isotonic sodium chloride, fixed oils such as synthetic mono- or digylcerides that may serve as the solvent or suspending medium, polyethylene glycols, glycerin, propylene glycol or other solvents; antibacterial agents such as benzyl alcohol or methyl paraben; antioxidants such as ascorbic acid or sodium bisulfite; buffers such as acetates, citrates or phosphates; chelating agents such as ethylenediaminetetraacetic acid; and agents for the adjustment of tonicity such as sodium, chloride, or dextrose. The parenteral preparation can be enclosed in ampoules, disposable syringes or multiple dose vials made of glass or plastic. Physiological saline is a preferred additive. An injectable pharmaceutical composition is preferably sterile.

[0220] It may also be desirable to include other components in the preparation, such as delivery vehicles including aluminum salts, water-in-oil emulsions, biodegradable oil vehicles, oil-in-water emulsions, biodegradable microcapsules, and liposomes. Examples of adjuvants for use in such vehicles include N-acetylmuramyl-L-alanine-D-isoglutamine (MDP), lipopolysaccharides (LPS), glucan, IL-12, GM-CSF, γ-interferon, and IL-15.

[0221] While any suitable carrier known to those of ordinary skill in the art may be employed in the pharmaceutical compositions of this disclosure, the type of carrier will vary depending on the mode of administration and whether a sustained release is desired. For parenteral administration, the carrier may comprise water, saline, alcohol, a fat, a wax, a buffer, or any combination thereof. For oral administration, any of the above carriers or a solid carrier, such as mannitol, lactose, starch, magnesium stearate, sodium saccharine, talcum, cellulose, glucose, sucrose, magnesium carbonate, or any combination thereof, may be employed.

[0222] Also contemplated is the administration of multi-specific fusion protein compositions of this disclosure in combination with a second agent. A second agent may be one accepted in the art as a standard treatment for a particular disease state, such as inflammation, autoimmunity, and cancer. Exemplary second agents contemplated include cytokines, growth factors, steroids, NSAIDs, DMARDs, chemotherapeutics, radiotherapeutics, or other active and ancillary agents.

[0223] This disclosure contemplates a dosage unit comprising a pharmaceutical composition of this disclosure. Such dosage units include, for example, a single-dose or a multi-dose vial or syringe, including a two-compartment vial or syringe, one comprising the pharmaceutical composition of this disclosure in lyophilized form and the other a diluent for reconstitution. A multi-dose dosage unit can also be, e.g., a bag or tube for connection to an intravenous infusion device.

[0224] This disclosure also contemplates a kit comprising a pharmaceutical composition in a unit dose or multi-dose container, e.g., a vial, and a set of instructions for administering the composition to patients suffering a disorder as described herein.

[0225] All U.S. patents, U.S. patent application publications, U.S. patent applications, foreign patents, foreign patent applications, non-patent publications, tables, sequences, webpages, or the like referred to in this specification, are incorporated herein by reference, in their entirety. The following examples are intended to illustrate, but not limit, this disclosure.

### EXAMPLES

### Xceptor Sequences

[0226] Exemplary IL6 antagonist variable region (V_{L} and V_{H}) binding sequences (SEQ ID NO:373-496) are disclosed herein. Also disclosed are amino acid sequences and nucleic acid expression cassettes for exemplary Xceptor fusion proteins comprising a TGFβR2 ectodomain and an anti-IL6xR binding domain. Xceptor fusion proteins having a TGFβR2 ectodomain at the amino-terminus and an anti-IL6xR binding domain at the carboxy terminus, are referred to herein as TRU(XB6)-1019.1 and TRU(XB6)-1019.2 (amino acid sequences provided in SEQ ID NO:737 and 738, respectively, with the corresponding nucleotide sequences being provided in SEQ ID NO:741 and 742, respectively). The Xceptor fusion proteins in the reverse orientation—that is, having an anti-IL6xR binding domain at the amino-terminus and a TGFβ2 ectodomain at the carboxy terminus, are referred to herein as TRU(X6B)-1019.1 and TRU(X6B)-1019.2 (amino acid sequences provided in SEQ ID NO:735 and 736, respectively, with the corresponding nucleotide sequences being provided in SEQ ID NO:739 and 740, respectively).

### Activity Examples

[0227] Various Xceptor fusion proteins described herein were tested for activity as described below. Abbreviations used in the following examples include the following terms, except where indicated otherwise:

[0228] PBS-T: PBS, pH 7.2-7.4 and 0.1% Tween®20

[0229] Working buffer: PBS-T with 1% BSA

[0230] Blocking buffer (PBS-T with 3% BSA

### Example 1

### TGFβ Binding Domains

[0231] A phage library of Fab binding domains is screened for binding domains specific for either a TGFβ or an IL6xR complex essentially as described by Hoet et al. (2005) Nature Biotechnol. 23:344. The binding domains are cloned by PCR amplification. Briefly, the VL and VH regions from the Fab library clones are amplified using PCR SuperMix (Invitrogen, San Diego, Calif.) and appropriate primers that create the G₄S linker via overlap, with an initial anneal at 56° C. for 9 cycles, then 62° C. for an additional 20 cycles. The PCR products are separated on an agarose gel and purified using a Qiagen (Chatsworth, Calif.) PCR Purification column. The second round sewing reaction involves mixing a molar equivalent of VL and VH products with Expand buffer and water, denaturing at 95° C. for 5 sec, then cooling slowly to room temperature. To amplify, a mix of dNTPs is added with Expand enzyme and incubated at 72° C. for 10 sec. The outside primers are added (5′ VH and 3′ VL) and the mix is cycled 35 times with an anneal at 62° C. and a 45 min extension reaction. The resulting 750 basepair product is gel purified, digested with EcoRI and NotI, and cloned in plasmid pD28 (for more details, see US Patent Application Publication No. 2005/0136049 and PCT Application Publication No. WO 2007/146968).

### Example 2

### Xceptor Binding to IL6 and Hyper IL6 by ELISA

[0232] Hyper-IL6 (HIL6 or IL6xR), recombinant human IL6 (rhIL6), and human soluble IL6R binding activity was examined for exemplary Xceptors TRU(XT6)-1002, 1019, 1025, 1042, 1058, and TRU(X6T)-1019 (SEQ ID NO:608, 625, 631, 648, 664 and 670, respectively), substantially as follows. Each of these Xceptors includes a TNFRSF1B ectodomain and an anti-IL6xR binding domain.

### HIL6 and IL6 Binding

[0233] Added to each well of a 96-well plate was 100 μl goat anti-human IgG-Fc (Jackson ImmunoResearch, West Grove, Pa.) from a 2 μg/ml solution in PBS, pH 7.2-7.4. The plate was covered, and incubated overnight at 4° C. After washing four times with PBS (pH 7.2-7.4) and 0.1% Tween®20 (PBS-T), 250 μl Blocking buffer (PBS-T with 3% BSA or 10% normal goat serum) was added to each well, the plate was covered, and incubated at room temperature for 2 hours (or at 4° C. overnight). After washing the plate three times with PBS-T, added in duplicate wells to the anti-human IgG-Fc coated plate was 100 μl/well Xceptor TNFRSF1B::anti-HIL6 samples and human gp130-Fc chimera (R&D Systems, Minneapolis, Minn.) serially diluted three-fold in Working buffer starting at 300 ng/ml, the plate was covered, and incubated at room temperature for about 1 to 2 hours. After washing the plate five times with PBS-T, added in duplicate wells was 100 μl/well human Hyper IL-6 or recombinant human IL-6 from a 150 pM solution in Working buffer, the plate was covered, and incubated at room temperature for about 1 to 2 hours. After washing the plate five times with PBS-T, 100 μl/well anti-human IL-6-biotin (R&D Systems) from a 150 ng/ml solution in Working buffer, the plate was covered, and incubated at room temperature for about 1 to 2 hours. After washing the plate five times with PBS-T, 100 μl per well horse radish peroxidase-conjugated streptavidin (Zymed, San Francisco, Calif.) diluted 1:4,000 in Working buffer was added, the plate was covered, and incubated at room temperature for 30 minutes. After washing the plate six times with PBS-T, 100 μl per well 3,3,5,5-tetramentylbenzidine (TMB) substrate solution (Pierce, Rockford, Ill.) was added for about 3 to 5 minutes and then the reaction was stopped with 50 μl Stop buffer (1N H₂SO₄) per well. The absorbance of each well was read at 450 nm.

sIL6R Binding

[0234] Added to each well of a 96-well plate was 100 μl goat anti-human IgG-Fc (ICN Pharmaceuticals, Costa Mesa, Calif.) from a 2 μg/ml solution in PBS, pH 7.2-7.4, The plates were covered, and incubated overnight at 4° C. After washing four times with PBS-T, 250 μl Blocking buffer (PBS-T with 3% BSA or 10% normal goat serum) was added to each well, the plate was covered, and incubated at room temperature for 2 hours (or at 4° C. overnight). After washing the plate three times with PBS-T, added in duplicate wells to the anti-human IgG-Fc coated plate was 100 μl/well Xceptor TNFRSF1B::anti-HIL6 samples, positive control anti-human IL-6R(R&D Systems, Minneapolis, Minn.) and negative controls human IgG or human gp130-Fc chimera (R&D Systems), each serially diluted three-fold in Working buffer starting at 300 ng/ml, the plate was covered, and incubated at room temperature for about 1 to 2 hours. After washing the plate five times with PBS-T, added in duplicate wells was 100 μl/well recombinant human sIL-6R(R&D Systems) from a 75 pM solution in Working buffer, the plate was covered, and incubated at room temperature for about 1 to 2 hours. After washing the plate five times with PBS-T, added 100 μl/well anti-human IL-6R-biotin (R&D Systems) from a 100 ng/ml solution in Working buffer, the plate was covered, and incubated at room temperature for about 1 to 2 hours. After washing the plate five times with PBS-T, 100 μl per well horse radish peroxidase-conjugated streptavidin (Zymed, San Francisco, Calif.) diluted 1:4,000 in Working buffer was added, the plate was covered, and incubated at room temperature for 30 minutes. After washing the plate six times with PBS-T, 100 μl per well 3,3,5,5-tetramentylbenzidine (TMB) substrate solution (Pierce, Rockford, Ill.) was added for about 3 to 5 minutes and then the reaction was stopped with 50 μl Stop buffer (1N H₂SO₄) per well. The absorbance of each well was read at 450 nm.

[0235] The data in FIGS. 1A-1C demonstrate that all Xceptor fusion proteins, whether the TNFRSF1B ectodomain was on the amino- or carboxy terminus of the fusion protein molecules, can bind HIL6. Furthermore, these assays show that the Xceptor proteins have specificity for the IL6xR complex because only two of the Xceptors bind rhIL6 (FIG. 1B) and none bind sIL6R (FIG. 1C). In related studies, the xceptor TRU(XT6)-1002 and the SMIP TRU(S6)-1002 were found to cross-react with IL6 from the non-human primate Mucaca mulatta.

### Example 3

### Xceptor Binding to TNF-α by ELISA

[0236] TNF-α binding activity was examined for Xceptors TRU(XT6)-1002, 1042, 1058, 1019, and TRU(X6T)-1019 (SEQ ID NO:608, 648, 664, 625 and 670, respectively), substantially as follows.

[0237] Added to each well of a 96-well plate was 100 μl goat anti-human IgG-Fc (ICN Pharmaceuticals, Costa Mesa, Calif.) from a 2 μg/ml solution in PBS, pH 7.2-7.4. The plate was covered, and incubated overnight at 4° C. After washing four times with PBS-T, 250 μl Blocking buffer was added to each well, the plate was covered, and incubated at room temperature for 2 hours (or at 4° C. overnight). After washing the plate three times with PBS-T, added in duplicate wells to the anti-human IgG-Fc coated plate was 100 μl/well Xceptor TNFRSF1B::anti-HIL6 samples, positive controls Enbrel® (etanercept) and recombinant human TNFR2 (TNFRSF1B)-Fc chimera (R&D Systems, Minneapolis, Minn.), and negative controls human IgG or human gp130-Fc chimera (R&D Systems), each serially diluted three-fold in Working buffer starting at 300 ng/ml, the plate was covered, and incubated at room temperature for about 1 to 2 hours. After washing the plate five times with PBS-T, added in duplicate wells was 100 μl/well recombinant human TNF-α (R&D Systems) from a 2 ng/ml solution in Working buffer, the plate was covered, and incubated at room temperature for about 1 to 2 hours. After washing the plate five times with PBS-T, added 100 μl/well anti-human TNF-α-biotin (R&D Systems) from a 200 ng/ml solution in Working buffer, the plate was covered, and incubated at room temperature for about 1 to 2 hours. After washing the plate five times with PBS-T, 100 μl per well horse radish peroxidase-conjugated streptavidin (Jackson ImmunoResearch, West Grove, Pa.) diluted 1:1,000 in Working buffer was added, the plate was covered, and incubated at room temperature for 30 minutes. After washing the plate six times with PBS-T, 100 μl per well 3,3,5,5-tetramentylbenzidine (TMB) substrate solution (Pierce, Rockford, Ill.) was added for about 3 to 5 minutes and then the reaction was stopped with 50 μl Stop buffer (1N H₂SO₄) per well. The absorbance of each well was read at 450 nm.

[0238] The data in FIG. 2 shows that all Xceptor fusion proteins tested can bind TNF-α, whether the TNFRSF1B ectodomain was on the amino- or carboxy terminus of the fusion protein.

### Example 4

### Xceptor Dual Ligand Binding by ELISA

[0239] Concurrent binding to TNF-α and to IL6xR complex was examined for Xceptor fusion protein TRU(XT6)-1006 (SEQ ID NO:612), substantially as follows.

[0240] Added to each well of a 96-well plate was 100 μl human HIL-6 solution (5 μg/ml in PBS, pH 7.2-7.4). The plate was covered, and incubated overnight at 4° C. After washing four times with PBS-T, then 250 μl Blocking buffer was added to each well, the plate was covered, and incubated at room temperature for 2 hours (or at 4° C. overnight). After washing the plate three times with PBS-T, added in duplicate wells to the HIL-6 coated plate was 100 μl/well Xceptor TNFRSF1B::HIL6 samples serially diluted three-fold in Working buffer starting at 300 ng/ml. Negative controls included human gp130-Fc chimera (R&D Systems, Minneapolis, Minn.), Enbrel® (etanercept), and Working buffer only. The plate was covered and incubated at room temperature for 1.5 hours. After washing the plate five times with PBS-T, 100 μl per well recombinant human TNF-α (R&D Systems, Minneapolis, Minn.) to 2 ng/ml in Working buffer was added, the plate was covered, and incubated at room temperature for 1.5 hr. After washing the plate five times with PBS-T, 100 μl per well anti-human TNF-α-biotin (R&D Systems) to 200 ng/ml in Working buffer was added, the plate was covered, and incubated at room temperature for 1.5 hr. After washing the plate five times with PBS-T, 100 μl per well horse radish peroxidase-conjugated streptavidin (Jackson ImmunoResearch, West Grove, Pa.) diluted 1:1000 in Working buffer was added, the plate was covered, and incubated at room temperature for 30 minutes. After washing the plate six times with PBS-T, 100 μl per well 3,3,5,5-tetramentylbenzidine (TMB) substrate solution (Pierce, Rockford, Ill.) was added for 3-5 minutes and then the reaction was stopped with 50 μl Stop buffer (1N H₂SO₄) per well. The absorbance of each well was read at 450 nm.

[0241] The data in FIG. 3 demonstrates that Xceptor proteins can bind two ligands simultaneously (in this case TNF-α and Hyper IL6).

### Example 5

### Xceptor Blocking of Hyper IL6 Binding to gp130 by ELISA

[0242] Blocking of Hyper IL6 (IL6xR) binding to soluble gp130 receptor by Xceptor fusion proteins TRU(XT6)-1004, 1006, 1007, 1008, 1013, and 1019 (SEQ ID NO:610, 612, 613, 614, 619 and 625, respectively), was examined substantially as follows.

[0243] Added to each well of a 96-well plate was 100 μl human gp130-Fc chimera (R&D Systems, Minneapolis, Minn.) from of 0.25-0.5 μg/ml solution in PBS, pH 7.2-7.4. The plates were covered, and incubated overnight at 4° C. After washing four times with PBS-T, 250 μl Blocking buffer (PBS-T with 3% BSA or 10% normal goat serum) was added to each well, the plate was covered, and incubated at room temperature for 2 hours (or at 4° C. overnight). Serial five-fold dilutions in Working buffer starting at 50 μg/ml were made of the following samples: Xceptor TNFRSF1B::anti-HIL6 samples, positive controls human gp130-Fc chimera (R&D Systems) and anti-human IL-6R(R&D Systems), and negative controls anti-human IL-6 (R&D Systems), human IgG or Enbrel® (etanercept). Equal volumes of the serially diluted Xceptor samples were mixed with Hyper IL-6 (final Hyper IL-6 concentration of 2.5 ng/ml) and incubated at room temperature for 1 hour. After washing the plate three times with PBS-T, added in duplicate wells to the human gp130-Fc coated plate was 100 μl/well of the serially dilutions of Xceptor/HIL6 mixtures, human gp130-Fc chimera, anti-human IL-6R, anti-human IL-6, human IgG, and Enbrel® (etanercept), the plate was covered, and incubated at room temperature for about 1.5 hours. After washing the plate five times with PBS-T, 100 μl per well horse radish peroxidase-conjugated anti-mouse IgG-Fc (Pierce, Rockford, Ill.) diluted 1:10,000 in Working buffer was added, the plate was covered, and incubated at room temperature for 1 hour. After washing the plate six times with PBS-T, 100 μl per well 3,3,5,5-tetramentylbenzidine (TMB) substrate solution (Pierce) was added for about 5 to 15 minutes and then the reaction was stopped with 50 μl Stop buffer (1N H₂SO₄) per well. The absorbance of each well was read at 450 nm.

[0244] The data in FIG. 4 demonstrate that Xceptor proteins comprising an anti-IL6xR binding domain can block soluble gp130 from binding to HIL6.

### Example 6

### Xceptor Blocking of IL6 and Hyper IL6 Induced Cell Proliferation

[0245] Blocking of IL6 or Hyper IL6 (IL6xR) induced cell proliferation of TF-1 cells was examined for Xceptor fusion proteins TRU(XT6)-1011, 1014, 1025, 1026, 1002, and TRU(X6T)-1019 (SEQ ID NO:617, 620, 631, 632, 608 and 670, respectively), substantially as follows.

[0246] Added to each well of a 96-well flat bottom plate were 0.3×10⁶ TF-1 cells (human erythroleukemia cells) in the fresh growth medium (10% FBS-RPMI 1640; 2 mM L-glutamine; 100 units/ml penicillin; 100 μg/ml streptomycin; 10 mM HEPES; 1 mM sodium pyruvate; and 2 ng/ml Hu GM-CSF) one day before use in proliferation assay. The cells were then harvested and washed twice with assay medium (same as growth medium except without GM-CSF, cytokine-free), then resuspended at 1×10⁵ cells/ml in assay medium. For blocking IL-6 activity, serial dilutions of a TNFSFR1B::anti-HIL-6 Xceptor of interest or antibody was pre-incubated with a fixed concentration of recombinant human IL-6 (rhIL-6) (R&D Systems, Minneapolis, Minn.) or hyper IL-6 (HIL-6) in 96-well plates for 1 hour at 37° C., 5% CO₂. Controls used included human IgG; human gp130-Fc chimera (R&D Systems); anti-hIL-6 antibody (R&D Systems); and anti-hIL-6R antibody (R&D Systems). After the pre-incubation period, 1×10⁴1 cells (in 100 μl) was added to each well. The final assay mixture, in a total volume of 200 μL/well, containing TNFSFR1B::HIL-6, rhIL-6, or HIL-6 and cells was incubated at 37° C., 5% CO₂ for 72 hours. During the last 4-6 hours of culture, ³H-thymidine (20 μCi/ml in assay medium, 25 μL/well) was added. The cells were harvested onto UniFilter-96 GF/c plates and incorporated ³H-Thymidine was determined using TopCount reader (Packard). The data are presented as the Mean of cpm±SD of triplicates. The percentage of blocking=100−(test cpm−control cpm/maximum cpm−control cpm)*100.

[0247] The data in FIG. 5A and FIG. 5B demonstrate that all Xceptor proteins, whether the TNFRSF1B ectodomain was on the amino- or carboxy terminus of the fusion protein molecules, can block cell proliferation induced by IL6 or Hyper IL6, respectively, or both.

### Example 7

### Xceptor Blocking of TNF-α Binding to TNFR by ELISA

[0248] Blocking of TNF-α binding to TNF receptor by Xceptor fusion proteins TRU(XT6)-1004, 1006, 1007, 1008, 1013, and 1019 (SEQ ID NO:610, 612, 613, 614, 619 and 625, respectively) was examined substantially as follows.

[0249] Added to each well of a 96-well plate was 100 μL recombinant human TNFR2-Fc chimera (R&D Systems, Minneapolis, Minn.) from of 0.25-0.5 μg/ml solution in PBS, pH 7.2-7.4. The plates were covered, and incubated overnight at 4° C. After washing four times with PBS-T, 250 μL Blocking buffer (PBS-T with 3% BSA or 10% normal goat serum) was added to each well, the plate was covered, and incubated at room temperature for 2 hours (or at 4° C. overnight). Serial five-fold dilutions in Working buffer starting at 50 to 250 μM were made of the following samples: Xceptor TNFRSF1B::anti-HIL6 samples, positive controls Enbrel® (etanercept) and anti-TNF-α (R&D Systems), and negative controls human gp130-Fc chimera (R&D Systems) and human IgG. Equal volumes of the serially diluted Xceptor samples were mixed with TNF-α (final TNF-α concentration of 2.5 ng/ml) and incubated at room temperature for 1 hour. After washing the plate three times with PBS-T, added in duplicate wells to the recombinant human TNFR2-Fc coated plate was 100 μl/well of the serially dilutions of Xceptor/TNF-α mixture, Enbrel® (etanercept), anti-TNF-α, human gp130-Fc chimera, and human IgG, the plate was covered, and incubated at room temperature for about 1.5 hours. After washing the plate five times with PBS-T, 100 μL per well of anti-human TNF-α-biotin (R&D Systems) from a 200 ng/ml solution in Working buffer was added, the plate was covered, and incubated at room temperature for 1 to 2 hours. After washing the plate five times with PBS-T, 100 μL per well horse radish peroxidase-conjugated streptavidin (Jackson ImmunoResearch, West Grove, Pa.) diluted 1:1,000 in Working buffer was added, the plate was covered, and incubated at room temperature for 30 minutes. After washing the plate six times with PBS-T, 100 μL per well 3,3,5,5-tetramentylbenzidine (TMB) substrate solution (Pierce, Rockford, Ill.) was added for about 3 to 5 minutes and then the reaction was stopped with 50 μl Stop buffer (1N H₂SO₄) per well. The absorbance of each well was read at 450 nm.

[0250] The data in FIG. 6 show that Xceptor proteins blocked TNF-α binding to TNF receptor, which was approximately equivalent to blocking by TNFR-Fc.

### Example 8

### Xceptor Blocking of TNF-α Induced Cell Killing

[0251] Blocking of TNF-α induced killing of L929 cells was examined for Xceptor fusion proteins TRU(XT6)-1011, 1014, 1025, 1026, 1002, and TRU(X6T)-1019 (SEQ ID NO:617, 620, 631, 632, 608 and 670, respectively), substantially as follows.

[0252] A suspension of L929 mouse fibroblast cells (ATCC, Manassas, Va.) was prepared at a density of 2×10⁵ cells/ml in culture medium (10% FBS-RPMI 1640; 2 mM L-glutamine; 100 units/ml penicillin; 100 μg/ml streptomycin; and 10 mM HEPES), then 100 μl was added to each well of a 96-well flat bottom black plate and incubated overnight at 37° C., 5% CO₂ in a humidified incubator. Xceptor TNFRSF1B::anti-HIL6 samples serially diluted in assay medium (same as culture medium but supplemented with 2% FBS) were mixed with an equal volume of recombinant human TNF-α (rhTNF-α; R&D Systems, Minneapolis, Minn.), and incubated at 37° C., 5% CO₂ in a humidified incubator for 1 hour. Positive controls (i.e., those agents that block TNF-α induced killing of L929 cells) included Enbrel® (etanercept), rhTNFR2-Fc chimera (R&D Systems, Minneapolis, Minn.), and anti-TNF-α antibody (R&D Systems, Minneapolis, Minn.). Negative controls included assay medium alone (no TNF-α added) and antibody hIgG (with TNF-α added). To analyze TNF-α activity, culture medium was removed from the L929 cells and then each well received 50 μl of a TNF-α/Xceptor or control mixture, and 50 μl actinomycin D (Sigma-Aldrich, St. Louis, Mo.) (from a freshly prepared working solution of 4 μg/ml). The cells were then incubated for 24 hrs at 37° C., 5% CO₂ in a humidified incubator. To measure cell viability, added to each well was 100 μl ATPlite 1 Step Reagent (PerkinElmer, Waltham, Mass.) according to the manufacturer's instructions, shaken for two minutes, and then luminescence is measured using a TopCount reader (Packard).

[0253] The data in FIG. 9 demonstrate that all Xceptor proteins, whether the TNFRSF1B ectodomain was on the amino- or carboxy terminus of the fusion protein molecules, can block TNF-α induced cell killing in this assay.

### Example 9

### Xceptor Binding to TGFβ by ELISA

[0254] TGFβ binding activity was examined for Xceptors X6B and XB6, substantially as follows.

[0255] Added to each well of a 96-well plate was 100 μl goat anti-human IgG-Fc (ICN Pharmaceuticals, Costa Mesa, Calif.) from a 2 μg/ml solution in PBS, pH 7.2-7.4. The plate was covered, and incubated overnight at 4° C. After washing four times with PBS-T, 250 μl Blocking buffer (PBS-T with 10% NGS) was added to each well, the plate was covered, and incubated at room temperature for 2 hours. After washing the plate three times with PBS-T, added in duplicate wells to the anti-human IgG-Fc coated plate was 100 μl/well Xceptor TGFβR2::anti-HIL6 samples, positive control recombinant human TGFβRII-Fc chimera (R&D Systems, Minneapolis, Minn.), and negative control recombinant human TNFR2 (TNFRSF1B)-Fc chimera (R&D Systems), each diluted to 300 ng/ml in Working buffer (PBS-T with 1% BSA). The plate was covered, and incubated at room temperature for about 1 hour. After washing the plate five times with Wash buffer (PBS/0.1% Tween 20 (PBS-T)), added was 100 μl/well TGFβ-1 ligand (R&D Systems), serially diluted two-fold in Working buffer starting at 4 ng/ml. The plate was covered, and incubated at room temperature for 1 hour. After washing the plate five times with Wash buffer, added was 100 μl/well biotinylated anti-TGFβ-1 (R&D Systems) from a 200 ng/ml solution in Working buffer. The plate was covered and incubated at room temperature for 1 hour. After washing the plate five times with Wash buffer, 100 μl per well horse radish peroxidase-conjugated streptavidin (Pierce Rockford, Ill.) diluted 1:20,000 in Working buffer was added, the plate was covered, and incubated at room temperature for 30 minutes. After washing the plate five times with Wash buffer, 100 μl per well QuantaBlu Fluorogenic Peroxidase Substrate solution (Pierce, Rockford, Ill.; prepared by mixing 9 ml substrate solution with 1 ml peroxide solution) was added, and the plate was covered and incubated at room temperature for 20 min. The reaction was stopped with 50 μl QuantaBlu Stop Solution per well. The absorbance of each well was read at 325 nm.

[0256] The data in FIG. 8 shows that the Xceptor fusion proteins tested bound TGFβ-1, whether the TGFβ2 ectodomain was on the amino- or carboxy terminus of the fusion protein.

### Example 10

### Expression of Xceptor Fusion Proteins

[0257] Expression of certain of the Xceptor fusion proteins disclosed herein in 293 cells was performed using the FreeStyle™ 293 Expression System (Invitrogen, Carlsbad, Calif.) according to the manufacturer's instructions.

[0258] For each 30 ml transfection, 3×10⁷ cells in 28 ml of FreeStyle™ 293 Expression Medium were used. On the day of transfection, a small aliquot of the cell suspension was transferred to a microcentrifuge tube, and the viability and the amount of cell clumping determined using the trypan blue dye exclusion method. The suspension was vigorously vortexed for 45 seconds to break up cell clumps and total cell counts determined using a Coulter Counter or a hemacytometer. The viability of the cells was over 90%. A shaker flask containing the required cells was placed in a 37° C. incubator on an orbital shaker.

[0259] For each transfection sample, lipid-DNA complexes were prepared as follows. 30 μg of plasmid DNA was diluted in Opti-MEM® I to a total volume of 1 ml and mixed gently. 60 μl of 293Fectin™ was diluted in Opti-MEM® I to a total volume of 1 ml, mixed gently, and incubated for 5 minutes at room temperature. After the 5 minute incubation, the diluted DNA was added to the diluted 293Fectin™ to obtain a total volume of 2 ml and mixed gently. The resulting solution was incubated for 20-30 minutes at room temperature to allow DNA-293Fectin™ complexes to form.

[0260] While the DNA-293Fectin™ complexes were incubating, the cell suspension was removed from the incubator and the appropriate volume of cell suspension was placed in a sterile, disposable 125 ml Erlenmeyer shaker flasks. Fresh, pre-warmed FreeStyle™ 293 Expression Medium was added up to a total volume of 28 ml for a 30 ml transfection.

[0261] After the DNA-293Fectin™ complex incubation was complete, 2 ml of DNA-293Fectin™ complex was added to the shaker flasks. 2 ml of Opti-MEM® I was added to the negative control flask, instead of DNA-293Fectin™ complex. Each flask contained a total volume of 30 ml, with a final cell density of approximately 1×10⁶ viable cells/ml. The cells were incubated in a 37° C. incubator with a humidified atmosphere of 8% CO₂ in air on an orbital shaker rotating at 125 rpm. Cells were harvested at approximately 7 days post-transfection and assayed for recombinant protein expression.

[0262] Xceptor molecules having a TNFRSF1B ectodomain and a TGFβRII ectodomain were expressed in 293 cells as described above.

### Example 11

### Xceptor Binding to Ligands by ELISA

[0263] The ability of xceptor molecules comprising a TNFRSF1B ectodomain and either a TWEAKR ectodomain, an OPG ectodomain, a TGFβRII ectodomain or an IL7R ectodomain to bind to the ligands TWEAK, RANKL, TGFβ or IL7, respectively, was examined substantially as follows.

[0264] Mouse and human ligands (R&D Systems, Minnesota, Minn.) were added to wells of a 96-well plate at a concentration of 1 μg/ml in PBS (100 μL/well). Plates were incubated at 4° C. overnight. After washing five times with PBS-T, 250 μL Blocking Buffer (PBS-T with 3% BSA) was added to each well, and the plate covered and incubated at room temperature (RT) for 2 hours. Serial three fold dilutions of xceptors were made in Working Buffer (PBS-T with 1% BSA) starting at 300 ng/ml. As a negative control, an irrelevant xceptor was used. The plate was incubated at RT for 1 hour. After washing five times with PBS-T, 100 μL per well of HRP-conjugated anti-human IgG-Fc (1:5000 in Working buffer) was added, the plate covered, and incubated at RT for 1 hour. After washing five times with PBS-T, 100 μL of Quant-Blu substrate (Pierce, Rockford, Ill.) was added to each well. The plate was incubated at RT for 10-30 minutes, and fluorescence measured at 325/420 nm.

[0265] The results are shown in Table 3 below. The binding of the TNFRxTGFβRII to mouse TGFβ was not tested, however it is noted that mouse and human TGFβ are 99% identical.

TABLE 3
Xceptor binding to Ligands

| | | Mouse ligand | Human ligand |
|---|---|---|---|
| TNFR x R | Ligand | binding | binding |
| TNFR x TWEAKR | TWEAK | +++ | +++ |
| TNFR x OPG | RANKL | +++ | +++ |
| TNFR x TGFβRII | TGFβ | homologous | +++ |
| TNFR x IL7R | IL7 | ND | + |

ND = Not Done

### Example 12

### Xceptor Blocking of TGFβ-1-Induced Inhibition of Cell Proliferation

[0266] Blocking of TGFβ-1 induced inhibition of IL-4 proliferation of HT2 cells was examined for the Xceptor of SEQ ID NO:1236 using the method described by Tsang et al. (Tsang, M. et al. (1995) Cytokine 7:389).

[0267] Briefly, in a 96 well plate, Xceptor TNFR::TGFβRII samples were serially diluted in culture medium (RPMI, 10% FCS, 0.05 mM beta-mercaptoethanol) containing 1 ng/ml of human TGFβ-1; 100 ul per well. The plate was incubated at 37° C., 5% CO₂ in a humidified incubator for 1.5 hours. Negative controls included an irrelevant xceptor protein (with TGFβ-1 added) and culture medium (with and without TGFβ-1 added). The positive control was a recombinant TGFβRII-Fc chimera (R&D Systems, Minneapolis, Minn.). Following incubation, 1×10⁴ HT2 cells (ATCC, Manassas, Va.) in 100 ul of culture medium containing 15 ng/ml mIL4 (R&D Systems, Minneapolis, Minn.) was added to each well. The plate was then incubated at 37° C., 5% CO₂ in a humidified incubator for 72 hours.

[0268] To analyze TGFβ-1 activity by measuring cell viability, 100 ul of culture medium was removed from each well and replaced with 10 μL WST-8 reagent (Dojindo Molecular Technologies, Rockville, Md.). The plate was incubated for 2 hours at 37° C., and absorbance for each well read at 450 nM.

[0269] The data in FIG. 9 shows that the xceptor protein blocked TGFβ-1 inhibition of IL4-mediated proliferation of HT2 cells.

### Example 13

### Specificity of Binding to Hyper IL6 and not Other gp130 Cytokines

[0270] The effect of Xceptor fusion proteins on induction of TF-1 cell proliferation by IL6 and the gp130 cytokines IL-11, leukemia inhibitory factor (LIF), oncostatin M (OSM) and cardiotrophin-1 (CT-1) was examined substantially as follows.

[0271] Added to each well of a 96-well flat bottom plate was 0.3×10⁶ TF-1 cells (human erythroleukemia cells) in fresh growth medium (10% FBS-RPMI 1640, 2 mM L-glutamine, 100 units/ml penicillin, 100 μg/ml streptomycin, 10 mM HEPES, 1 mM sodium pyruvate and 2 ng/ml Hu GM-CSF) one day before use in the proliferation assay. The cells were harvested and washed twice with assay medium (same as growth medium except without GM-CSF, cytokine-free), then resuspended at 1×10⁵ cells/ml in assay medium. For examining blocking of LIF, OSM, and CT-1 activity, serial dilutions of a TNFSFR1B::anti-HIL-6 xceptors TRU(XT6)-1002 (SEQ ID NO:608), TRU(XT6)-1019 (SEQ ID NO:625), TRU(XT6)-1022 (SEQ ID NO:628), and TRU(XT6)-1025 (SEQ ID NO:631) were pre-incubated with a fixed concentration of each gp130 cytokine individually or hyper IL-6 (HIL-6) in 96-well plates for 1 hour at 37° C., 5% CO₂. After the pre-incubation period, 1×10⁴ cells (in 100 μl) were added to each well. The final assay mixture, in a total volume of 200 μL/well, containing TNFSFR1B::HIL-6, gp130 cytokine or HIL-6 and cells, was incubated at 37° C., 5% CO₂ for 72 hours. During the last 4-6 hours of culture, ³H-thymidine (20 μCi/ml in assay medium, 25 μL/well) was added. The cells were harvested onto UniFilter-96 GF/c plates and incorporated ³H-Thymidine was determined using TopCount reader (Packard). The percentage of blocking=100−(test cpm−control cpm/maximum cpm−control cpm)*100.

[0272] The results showed that the xceptor blocked IL6 activity but not IL-11, LIF, OSM or CT-1 (data not shown), and therefore bound to hyper IL6 but had no effect on the other gp130 cytokines tested.

### Example 14

### SMIP and Xceptor Binding to IL6R on Liver Cells

[0273] The ability of TRU(S6)-1002, TRU(XT6)-1019 and the anti-IL6 antibody hu-PM1 to bind to IL6R on the liver-derived HepG2 cells was examined as follows.

[0274] HepG2 cells were washed in FACS Buffer and adjusted to 2×10⁶ cells/mL in FACS Buffer (PBS+3% FBS). To wells of a 96-well plate were added 50 μL of this solution (10⁵ cells/well). The plates were held at 37° C. until ready to add diluted test molecules. Serial dilutions of the test molecules were prepared in FACS Buffer to give a 2× working stock which was diluted to 1× when added to cells. The diluted test molecules were added to cells (50 μL/well) and the cells incubated for 20 min on ice. Whole IgG was used as a control. The cells were then washed two times with FACS Buffer and resuspended in phycoerythrin-conjugated goat anti-human antibody (Jackson Labs; diluted 1:200 in FACS Buffer). After being incubated for 20 min on ice in the dark, the cells were washed two times with FACS buffer, resuspended in 200 ul PBS and read on a LSRII™ flow cytometer (BD Biosciences, San Jose, Calif.).

[0275] As shown in FIG. 10, TRU(S6)-1002 and TRU(XT6)-1029 showed essentially no binding to HepG2 cells.

### Example 15

### SMIP and Xceptor Blocking of Il-6 and TNF Activity in Mice

[0276] The ability of SMIP and Xceptor fusion proteins disclosed herein to block IL-6 or TNF-induced production of serum amyloid A (SAA) protein in mice was examined as described below. SAA is one of the major acute-phase proteins in humans and mice. Prolonged elevation of plasma SAA levels is found in chronic inflammation and leads to amyloidosis which affects the liver, kidney and spleen (Rienhoff et al., (1990) Mol. Biol. Med. 7:287). Both IL-6 and TNF have been shown to induce SAA when administered alone (Benigni et al., (1996) Blood 87:1851; Ramadori et al., (1988) Eur. J. Immunol. 18:1259).

(a) Blocking of hyperIL-6 Activity

[0277] Female BALB/C mice were injected retro-orbitally with 0.2 ml PBS, or Enbrel® (200 ug), TRU(S6)-1002 (200 ug) or TRU(XT6)-1002 (300 ug or 500 ug) in PBS. One hour later, the mice were injected IP with 0.2 ml PBS or 2 μg human hyper-IL6 in PBS. Mouse serum was collected at 2 hours and 24 hours after the IP injection. The serum concentration of SAA was determined by ELISA, and concentration of sgp130 was determined by a Luminex-based mouse soluble receptor assay. As shown in FIGS. 11 and 12, TRU(S6)-1002 and TRU(XT6)-1002 blocked hyperIL6-induced expression of both sgp130 and SAA.

### (b) Blocking of TNF Activity

[0278] Female BALB/C mice were injected retro-orbitally with 0.2 ml PBS, or Enbrel® (200 μg), TRU(S6)-1002 (200 μg) or TRU(XT6)-1002 (300 μg) in PBS. One hour later, the mice were injected IP with 0.2 ml PBS or 0.5 ug mouse TNF-α in PBS. Mouse serum was collected at 2 hours and 24 hours after the IP injection. The serum concentration of SAA was determined by ELISA, and concentration of sgp130 was determined by a Luminex-based mouse soluble receptor assay. As shown in FIGS. 13A and B, the Xceptor TRU(XT6)-1002 blocked TNFα-induced expression of SAA, with the level of SAA observed at 2 hours post-injection being similar to that seen with Enbrel®.

### Example 16

### Xceptor Activity In Vivo

[0279] The therapeutic efficacy of Xceptor molecules described herein is examined in animal models of disease as described below.

### (a) Multiple Myeloma

[0280] The activity of Xceptor molecules is examined in at least one of two well characterized mouse models of multiple myeloma, namely the 5T2 multiple myeloma (5T2MM) model and the 5T33 multiple myeloma (5T33MM) model. In the 5T33 model, mice are treated with Xceptors from the time of injection of tumor cells (prophylactic mode). In the 5T2MM model, mice are treated from the onset of the disease (therapeutic mode). The effect of treatment on tumor development and angiogenesis is assessed in both models, with bone studies also being performed in the 5T2MM model.

[0281] The 5TMM murine model of myeloma was initially developed by Radl et al. (J. Immunol. (1979) 122:609; see also Radl et al. Am. J. Pathol. (1988) 132:593; Radl J. Immunol. Today (1990) 11:234). Its clinical characteristics resemble the human disease closely: the tumor cells are located in the bone marrow, the serum paraprotein concentration is a measure of disease development, neovascularization is increased in both the 5T2MM and 5T33MM models (Van Valckenborgh et al., Am. J. Pathol. (1988) 132:593), and in certain lines a clear osteolytic bone disease develops. The 5T2MM model includes moderate tumor growth and the development of osteolytic bone lesions. These lesions are associated with a decrease in cancellous bone volume, decreased bone mineral density and increased numbers of osteoclasts (Croucher et al., Blood (2001) 98:3534). The 5T33MM model has a more rapid tumor take and, in addition to the bone marrow, tumor cells also grow in the liver (Vanderkerken et al., Br. J. Cancer (1997) 76:451).

[0282] The 5T2 and 5T33MM models have been extensively characterized. Specific monoclonal antibodies have been raised against the idiotype of both 5T2 and 5T33MM allowing the detection, with great sensitivity, of the serum paraprotein by ELISA, and the specific staining of the tumor cells both by FACS analysis and immunostaining of histological sections (Vanderkerken et al., Br. J. Cancer (1997) 76:451). The sequence analysis of the VH gene enables the detection of cells by RT-PCR and Northern blot analysis (Zhu et al., Immunol. (1998) 93:162). The 5TMM models, which can be used for both in vitro and in vivo experiments, generate a typical MM disease and different methods are available to assess tumor load in the bone marrow, serum paraprotein concentrations, bone marrow angiogenesis (by measuring the microvessel density) and osteolytic bone lesions (by a combination of radiography, densitometry and histomorphometry). The investigation of these latter parameters allow the use of the 5TMM models in a preclinical setting and study of the growth and biology of the myeloma cells in a complete syngeneic microenvironment. Both molecules targeting the MM cells themselves and molecules targeting the bone marrow microenvironment can be studied. Specifically, while the 5T33MM model can be used to study both the microenvironment and the MM cells themselves, the 5T2MM model can also be used to study the myeloma associated bone disease.

[0283] To study the prophylactic efficacy of the Xceptor molecules disclosed herein, C57BL/KaLwRij mice are injected with 2×10⁶ 5T33 MM cells and with Xceptor on day 0. Mice are sacrificed at day 28 and tumor development is assessed by determining serum paraprotein concentration and the percentage of tumor cells on isolated bone marrow cells (determined by flow cytometry with anti-idiotype antibodies or by cytosmears). The weight of spleen and liver is determined and these organs are fixed in 4% formaldehyde for further analysis. Bone samples are fixed for further processing including CD31 immunostaining on paraffin sections and quantification of microvessel density.

[0284] To study the therapeutic efficacy of the Xceptor molecules disclosed herein, mice are injected with 5T2MM cells on day 0, and Xceptor is administered following the onset of disease, as determined by the presence of detectable levels of serum paraprotein. Mice are sacrificed approximately five weeks following administration of Xceptor, and tumor development is assessed as described above for the prophylactic study. In addition, bone analysis is performed using X-rays to determine the number of bone lesions and trabecular bone area, and TRAP staining to assess the number of osteoclasts.

### (b) Rheumatoid Arthritis

[0285] The therapeutic efficacy of the Xceptor molecules disclosed herein is examined in at least one of two murine models of rheumatoid arthritis (RA), namely the collagen induced arthritis (CIA) and glucose-6-phosphate isomerase (G6PI) models. Each of these models has been shown by others to be useful for predicting efficacy of certain classes of therapeutic drugs in RA (see Holmdahl (2000) Arthritis Res. 2:169; Holmdahl (2006) Immunol. Lett. 103:86; Holmdahl (2007) Methods Mol. Med. 136:185; McDevitt (2000) Arthritis Res. 2:85; Kamradt and Schubert (2005) Arthritis Res. Ther. 7:20).

### (i) CIA Model

[0286] The CIA model is the best characterized mouse model of arthritis in terms of its pathogenesis and immunological basis. In addition, it is the most widely used model of RA and, although not perfect for predicting the ability of drugs to inhibit disease in patients, is considered by many to be the model of choice when investigating potential new therapeutics for RA (Jirholt, J. et al. (2001) Arthritis Res. 3:87-97; Van den Berg, W. B. (2002) Curr. Rheumatol. Rep. 4:232-239; Rosloniec, E. (2003) Collagen-Induced Arthritis. In Current Protocols in Immunology, eds. Coligan et al., John Wiley & Sons, Inc, Hoboken, N.J.).

[0287] In the CIA model, arthritis is induced by immunization of male DBA/1 mice with collagen II (CII) in Complete Freund's Adjuvant (CFA). Specifically, mice are injected intradermally/subcutaneously with CII in CFA on Day-21 and boosted with CII in Incomplete Freund's Adjuvant (IFA) on Day 0. Mice develop clinical signs of arthritis within days of the boost with CII/IFA. A subset of mice (0% to 10%) immunized with CII/CFA develop signs of arthritis on or around Day 0 without a boost and are excluded from the experiments. In some CIA experiments, the boost is omitted and mice are instead treated with Xceptor or control starting 21 days after immunization with CII/CFA (i.e. the day of first treatment is Day 0).

[0288] Mice are treated with Xceptor, vehicle (PBS), or negative or positive control in a preventative and/or therapeutic regimen. Preventative treatment starts on Day 0 and continues through the peak of disease in control (untreated) mice. Therapeutic treatment starts when the majority of mice show mild signs of arthritis. Enbrel®, which has been shown to have good efficacy in both the CIA and G6PI-induced models of arthritis, is used as a positive control. Data collected in every experiment includes clinical scores and cumulative incidence of arthritis. Clinical signs of arthritis in the CIA model are scored using a scale from 0 to 4 as shown in Table 4 below:

TABLE 4

| Score | Observations |
|---|---|
| 0 | No apparent swelling or redness |
| 1 | Swelling/redness in one to three digits |
| 2 | Redness and/or swelling in more than three digits, mild swelling |
| | extending into the paw, swollen or red ankle, or mild |
| | swelling/redness of forepaw |
| 3 | Swollen paw with mild to moderate redness |
| 4 | Extreme redness and swelling in entire paw |

### (ii) G6PI Model

[0289] In the G6PI model, arthritis is induced by immunization of DBA/1 mice with G6PI in adjuvant (Kamradt, T. and D. Schubert (2005) Arthritis Res. Ther. 7:20-28; Schubert, D. et al. (2004) J. Immunol. 172:4503-4509; Bockermann, R. et al. (2005) Arthritis Res. Ther. 7:R1316-1324; Iwanami, K. et al. (2008) Arthritis Rheum. 58:754-763; Matsumoto, I. et al. (2008) Arthritis Res. Ther. 10:R66). G6PI is an enzyme present in virtually all cells in the body and it is not known why immunization induces a joint specific disease. A number of agents, such as CTLA4-Ig, TNF antagonists (e.g. Enbrel®) and anti-IL6 receptor monoclonal antibody, have been shown to inhibit development of arthritis in the G6PI model.

[0290] Male DBA/1 mice are immunized with G6PI in Complete Freund's Adjuvant (CFA) in order to induce arthritis. Specifically, mice are injected intradermally/subcutaneously with G6PI in CFA on Day 0 and develop clinical signs of arthritis within days of the immunization. As with the CIA model discussed above, mice are treated with Xceptor, vehicle (PBS), or negative or positive control in a preventative and/or therapeutic regimen. Preventative treatment starts on Day 0 and continues through the peak of disease in control mice. Therapeutic treatment starts when the majority of mice show mild signs of arthritis. Enbrel®, which has been shown to have good efficacy in both the CIA and G6PI-induced models of arthritis, is used as a positive control. Data collected in every experiment includes clinical scores and cumulative incidence of arthritis. Clinical signs of arthritis in the G6PI model are scored using a scale similar to that employed for the CIA model.

### (c) Polycystic Kidney Disease

[0291] The efficacy of an xceptor fusion protein (preferably containing a TNF antagonist and a TGFβ antagonist, as disclosed herein) in the treatment of polycystic kidney disease is tested in murine models as described in Gattone et al., Nat. Med. (2003) 9:1323-6; Tones et al. Nat. Med. (2004) 10:363-4; Wang et al. J. Am. Soc. Nephrol. (2005) 16:846-851; and Wilson (2008) Curr. Top. Dev. Biol. 84:311-50.

[0292] SEQ ID NOS:1-1255 are set out in the attached Sequence Listing. The codes for nucleotide sequences used in the attached Sequence Listing, including the symbol “n,” conform to WIPO Standard ST.25 (1998), Appendix 2, Table 1.

The application's sequence listing, which the Patent Office published only in electronic form, follows.

SEQUENCE LISTING (1255 sequences)

SEQ ID NO: 1 - protein, 11 aa, Artificial Sequence
  Made in a lab
SGEKLGDIYAS

SEQ ID NO: 2 - protein, 7 aa, Artificial Sequence
  Made in a lab
QDTKRPS

SEQ ID NO: 3 - protein, 8 aa, Artificial Sequence
  Made in a lab
QAWDSSTV

SEQ ID NO: 4 - protein, 14 aa, Artificial Sequence
  Made in a lab
SGTDSDVGGYNHVS

SEQ ID NO: 5 - protein, 7 aa, Artificial Sequence
  Made in a lab
DVDHRPS

SEQ ID NO: 6 - protein, 10 aa, Artificial Sequence
  Made in a lab
SSYRSGSTYV

SEQ ID NO: 7 - protein, 11 aa, Artificial Sequence
  Made in a lab
RASQSISSYLN

SEQ ID NO: 8 - protein, 7 aa, Artificial Sequence
  Made in a lab
AASALQS

SEQ ID NO: 9 - protein, 9 aa, Artificial Sequence
  Made in a lab
QQSYSPPVT

SEQ ID NO: 10 - protein, 11 aa, Artificial Sequence
  Made in a lab
RASQSISSWLA

SEQ ID NO: 11 - protein, 7 aa, Artificial Sequence
  Made in a lab
KASSLES

SEQ ID NO: 12 - protein, 8 aa, Artificial Sequence
  Made in a lab
QQYNSYWT

SEQ ID NO: 13 - protein, 11 aa, Artificial Sequence
  Made in a lab
RASQSVSSYLA

SEQ ID NO: 14 - protein, 7 aa, Artificial Sequence
  Made in a lab
DASNRAT

SEQ ID NO: 15 - protein, 10 aa, Artificial Sequence
  Made in a lab
QQRSNWPPFT

SEQ ID NO: 16 - protein, 11 aa, Artificial Sequence
  Made in a lab
QTSQSIDRYLN

SEQ ID NO: 17 - protein, 7 aa, Artificial Sequence
  Made in a lab
AASSLQS

SEQ ID NO: 18 - protein, 9 aa, Artificial Sequence
  Made in a lab
QQSYRTPRT

SEQ ID NO: 19 - protein, 12 aa, Artificial Sequence
  Made in a lab
RASQSVSSSYLA

SEQ ID NO: 20 - protein, 7 aa, Artificial Sequence
  Made in a lab
GASSRAT

SEQ ID NO: 21 - protein, 10 aa, Artificial Sequence
  Made in a lab
QQYGSSPLWT

SEQ ID NO: 22 - protein, 11 aa, Artificial Sequence
  Made in a lab
RASQSISSYLN

SEQ ID NO: 23 - protein, 7 aa, Artificial Sequence
  Made in a lab
AASSLQS

SEQ ID NO: 24 - protein, 9 aa, Artificial Sequence
  Made in a lab
QQSYSTPRT

SEQ ID NO: 25 - protein, 11 aa, Artificial Sequence
  Made in a lab
RASQSISTSLA

SEQ ID NO: 26 - protein, 8 aa, Artificial Sequence
  Made in a lab
YDASKRAS

SEQ ID NO: 27 - protein, 11 aa, Artificial Sequence
  Made in a lab
QLRINWPPEFT

SEQ ID NO: 28 - protein, 11 aa, Artificial Sequence
  Made in a lab
RASRGVITWLN

SEQ ID NO: 29 - protein, 7 aa, Artificial Sequence
  Made in a lab
GASTLQT

SEQ ID NO: 30 - protein, 9 aa, Artificial Sequence
  Made in a lab
QQTHSFPLT

SEQ ID NO: 31 - protein, 11 aa, Artificial Sequence
  Made in a lab
SGDKLGEKYVS

SEQ ID NO: 32 - protein, 7 aa, Artificial Sequence
  Made in a lab
QDTKRPS

SEQ ID NO: 33 - protein, 9 aa, Artificial Sequence
  Made in a lab
QTWDSDTYV

SEQ ID NO: 34 - protein, 11 aa, Artificial Sequence
  Made in a lab
RASQSISSYLN

SEQ ID NO: 35 - protein, 7 aa, Artificial Sequence
  Made in a lab
AASSLQS

SEQ ID NO: 36 - protein, 9 aa, Artificial Sequence
  Made in a lab
QQSYSTLWT

SEQ ID NO: 37 - protein, 11 aa, Artificial Sequence
  Made in a lab
RASQSVRSYLA

SEQ ID NO: 38 - protein, 7 aa, Artificial Sequence
  Made in a lab
DASNRAT

SEQ ID NO: 39 - protein, 9 aa, Artificial Sequence
  Made in a lab
QQYDNLPLT

SEQ ID NO: 40 - protein, 11 aa, Artificial Sequence
  Made in a lab
RTSQSVATYVN

SEQ ID NO: 41 - protein, 7 aa, Artificial Sequence
  Made in a lab
AASSLQS

SEQ ID NO: 42 - protein, 9 aa, Artificial Sequence
  Made in a lab
QQSYSVPIT

SEQ ID NO: 43 - protein, 11 aa, Artificial Sequence
  Made in a lab
RASQSMSNWLA

SEQ ID NO: 44 - protein, 7 aa, Artificial Sequence
  Made in a lab
DVFTLKS

SEQ ID NO: 45 - protein, 10 aa, Artificial Sequence
  Made in a lab
QQYSDYSGIT

SEQ ID NO: 46 - protein, 13 aa, Artificial Sequence
  Made in a lab
SGSSSNIGSKVVY

SEQ ID NO: 47 - protein, 7 aa, Artificial Sequence
  Made in a lab
RNDQRPS

SEQ ID NO: 48 - protein, 12 aa, Artificial Sequence
  Made in a lab
AAWDDSLSGRWV

SEQ ID NO: 49 - protein, 11 aa, Artificial Sequence
  Made in a lab
RASQSISSWLA

SEQ ID NO: 50 - protein, 7 aa, Artificial Sequence
  Made in a lab
KASGLES

SEQ ID NO: 51 - protein, 9 aa, Artificial Sequence
  Made in a lab
QQYNSYPFT

SEQ ID NO: 52 - protein, 11 aa, Artificial Sequence
  Made in a lab
QASRDISIYLN

SEQ ID NO: 53 - protein, 7 aa, Artificial Sequence
  Made in a lab
GASTLRS

SEQ ID NO: 54 - protein, 9 aa, Artificial Sequence
  Made in a lab
QKYNSAPYT

SEQ ID NO: 55 - protein, 11 aa, Artificial Sequence
  Made in a lab
RASQGISSWLA

SEQ ID NO: 56 - protein, 7 aa, Artificial Sequence
  Made in a lab
AASSLQS

SEQ ID NO: 57 - protein, 9 aa, Artificial Sequence
  Made in a lab
QQANSFPLT

SEQ ID NO: 58 - protein, 11 aa, Artificial Sequence
  Made in a lab
RASQSINTYLA

SEQ ID NO: 59 - protein, 7 aa, Artificial Sequence
  Made in a lab
DASNRAT

SEQ ID NO: 60 - protein, 9 aa, Artificial Sequence
  Made in a lab
QQYGRSRYT

SEQ ID NO: 61 - protein, 11 aa, Artificial Sequence
  Made in a lab
RASQGISNYLA

SEQ ID NO: 62 - protein, 7 aa, Artificial Sequence
  Made in a lab
AASTLQS

SEQ ID NO: 63 - protein, 9 aa, Artificial Sequence
  Made in a lab
QQSDNIPYT

SEQ ID NO: 64 - protein, 13 aa, Artificial Sequence
  Made in a lab
SGSSSNIGSNTVN

SEQ ID NO: 65 - protein, 7 aa, Artificial Sequence
  Made in a lab
SNNQRPS

SEQ ID NO: 66 - protein, 11 aa, Artificial Sequence
  Made in a lab
AAWDDSLNGYV

SEQ ID NO: 67 - protein, 11 aa, Artificial Sequence
  Made in a lab
RASQSISTYLN

SEQ ID NO: 68 - protein, 7 aa, Artificial Sequence
  Made in a lab
EATNLQS

SEQ ID NO: 69 - protein, 9 aa, Artificial Sequence
  Made in a lab
QQANNFPFT

SEQ ID NO: 70 - protein, 13 aa, Artificial Sequence
  Made in a lab
SGSSSNIGGNAVN

SEQ ID NO: 71 - protein, 7 aa, Artificial Sequence
  Made in a lab
SSNHRPS

SEQ ID NO: 72 - protein, 11 aa, Artificial Sequence
  Made in a lab
AAWDDSLNGPL

SEQ ID NO: 73 - protein, 10 aa, Artificial Sequence
  Made in a lab
SGEKLGDRYA

SEQ ID NO: 74 - protein, 7 aa, Artificial Sequence
  Made in a lab
QDTKRPS

SEQ ID NO: 75 - protein, 11 aa, Artificial Sequence
  Made in a lab
AAWDDSLKGVV

SEQ ID NO: 76 - protein, 13 aa, Artificial Sequence
  Made in a lab
SGRSSNIGSNSVN

SEQ ID NO: 77 - protein, 7 aa, Artificial Sequence
  Made in a lab
SNNHRPS

SEQ ID NO: 78 - protein, 11 aa, Artificial Sequence
  Made in a lab
AAWDDSLYQGV

SEQ ID NO: 79 - protein, 11 aa, Artificial Sequence
  Made in a lab
RASQSISSYLN

SEQ ID NO: 80 - protein, 7 aa, Artificial Sequence
  Made in a lab
AASSLQS

SEQ ID NO: 81 - protein, 9 aa, Artificial Sequence
  Made in a lab
QQYEYFPPT

SEQ ID NO: 82 - protein, 12 aa, Artificial Sequence
  Made in a lab
RASQSVSSSYLA

SEQ ID NO: 83 - protein, 7 aa, Artificial Sequence
  Made in a lab
GASSRAT

SEQ ID NO: 84 - protein, 9 aa, Artificial Sequence
  Made in a lab
QQYGSSSLT

SEQ ID NO: 85 - protein, 11 aa, Artificial Sequence
  Made in a lab
RSSQRISGYLN

SEQ ID NO: 86 - protein, 7 aa, Artificial Sequence
  Made in a lab
AASTLQS

SEQ ID NO: 87 - protein, 9 aa, Artificial Sequence
  Made in a lab
QQSYSPPFT

SEQ ID NO: 88 - protein, 11 aa, Artificial Sequence
  Made in a lab
RASQSISTWLA

SEQ ID NO: 89 - protein, 7 aa, Artificial Sequence
  Made in a lab
KASSLQS

SEQ ID NO: 90 - protein, 9 aa, Artificial Sequence
  Made in a lab
QQYKSYPFT

SEQ ID NO: 91 - protein, 11 aa, Artificial Sequence
  Made in a lab
QASQDIRSYLN

SEQ ID NO: 92 - protein, 7 aa, Artificial Sequence
  Made in a lab
DTVNLQT

SEQ ID NO: 93 - protein, 9 aa, Artificial Sequence
  Made in a lab
QQYEYLPIT

SEQ ID NO: 94 - protein, 11 aa, Artificial Sequence
  Made in a lab
RASQSISNYLN

SEQ ID NO: 95 - protein, 8 aa, Artificial Sequence
  Made in a lab
YAASSLHS

SEQ ID NO: 96 - protein, 9 aa, Artificial Sequence
  Made in a lab
QQSYSTSGT

SEQ ID NO: 97 - protein, 11 aa, Artificial Sequence
  Made in a lab
RASQSISSYLN

SEQ ID NO: 98 - protein, 7 aa, Artificial Sequence
  Made in a lab
AASSLQS

SEQ ID NO: 99 - protein, 9 aa, Artificial Sequence
  Made in a lab
QQSYSTPVT

SEQ ID NO: 100 - protein, 11 aa, Artificial Sequence
  Made in a lab
RASQSIDTYLN

SEQ ID NO: 101 - protein, 7 aa, Artificial Sequence
  Made in a lab
AASSLQS

SEQ ID NO: 102 - protein, 10 aa, Artificial Sequence
  Made in a lab
QQSYSSPGIT

SEQ ID NO: 103 - protein, 11 aa, Artificial Sequence
  Made in a lab
RASQSIGTYLN

SEQ ID NO: 104 - protein, 7 aa, Artificial Sequence
  Made in a lab
GTSSLQR

SEQ ID NO: 105 - protein, 9 aa, Artificial Sequence
  Made in a lab
QQSYTSPPT

SEQ ID NO: 106 - protein, 11 aa, Artificial Sequence
  Made in a lab
SGDQLGGKFTS

SEQ ID NO: 107 - protein, 7 aa, Artificial Sequence
  Made in a lab
QDTKRPS

SEQ ID NO: 108 - protein, 9 aa, Artificial Sequence
  Made in a lab
LVWDSNTYV

SEQ ID NO: 109 - protein, 11 aa, Artificial Sequence
  Made in a lab
GGNNIGSKSVH

SEQ ID NO: 110 - protein, 7 aa, Artificial Sequence
  Made in a lab
DDSDRPS

SEQ ID NO: 111 - protein, 11 aa, Artificial Sequence
  Made in a lab
QVWDSSGGLQV

SEQ ID NO: 112 - protein, 11 aa, Artificial Sequence
  Made in a lab
RASQSISSWLA

SEQ ID NO: 113 - protein, 7 aa, Artificial Sequence
  Made in a lab
KASNLES

SEQ ID NO: 114 - protein, 9 aa, Artificial Sequence
  Made in a lab
QQYNAYPFI

SEQ ID NO: 115 - protein, 11 aa, Artificial Sequence
  Made in a lab
RASQSISSWLA

SEQ ID NO: 116 - protein, 7 aa, Artificial Sequence
  Made in a lab
KASSLES

SEQ ID NO: 117 - protein, 8 aa, Artificial Sequence
  Made in a lab
QQYKSYWT

SEQ ID NO: 118 - protein, 13 aa, Artificial Sequence
  Made in a lab
SGSPSNIGSNSVN

SEQ ID NO: 119 - protein, 7 aa, Artificial Sequence
  Made in a lab
YDDLVPS

SEQ ID NO: 120 - protein, 11 aa, Artificial Sequence
  Made in a lab
AAWDDRLNGWV

SEQ ID NO: 121 - protein, 11 aa, Artificial Sequence
  Made in a lab
RASQGISSWLA

SEQ ID NO: 122 - protein, 7 aa, Artificial Sequence
  Made in a lab
AASSLQS

SEQ ID NO: 123 - protein, 9 aa, Artificial Sequence
  Made in a lab
QQANSFPLT

SEQ ID NO: 124 - protein, 11 aa, Artificial Sequence
  Made in a lab
RASQSISSYLN

SEQ ID NO: 125 - protein, 7 aa, Artificial Sequence
  Made in a lab
AASSLQS

SEQ ID NO: 126 - protein, 9 aa, Artificial Sequence
  Made in a lab
QQSYSTPYT

SEQ ID NO: 127 - protein, 12 aa, Artificial Sequence
  Made in a lab
RASQSVSSSYLA

SEQ ID NO: 128 - protein, 7 aa, Artificial Sequence
  Made in a lab
GASNRVT

SEQ ID NO: 129 - protein, 8 aa, Artificial Sequence
  Made in a lab
HQYGSQYT

SEQ ID NO: 130 - protein, 11 aa, Artificial Sequence
  Made in a lab
QASQHISNFLN

SEQ ID NO: 131 - protein, 7 aa, Artificial Sequence
  Made in a lab
DTSNLRS

SEQ ID NO: 132 - protein, 9 aa, Artificial Sequence
  Made in a lab
QQYDNFPLT

SEQ ID NO: 133 - protein, 13 aa, Artificial Sequence
  Made in a lab
SGSTSNIGNNAVI

SEQ ID NO: 134 - protein, 7 aa, Artificial Sequence
  Made in a lab
YDDLLPS

SEQ ID NO: 135 - protein, 11 aa, Artificial Sequence
  Made in a lab
ASWDDNLNGPL

SEQ ID NO: 136 - protein, 11 aa, Artificial Sequence
  Made in a lab
RASQSISSWLA

SEQ ID NO: 137 - protein, 7 aa, Artificial Sequence
  Made in a lab
QASTLES

SEQ ID NO: 138 - protein, 9 aa, Artificial Sequence
  Made in a lab
QQANSFPIT

SEQ ID NO: 139 - protein, 11 aa, Artificial Sequence
  Made in a lab
QASQDITNYLN

SEQ ID NO: 140 - protein, 7 aa, Artificial Sequence
  Made in a lab
DASNLQT

SEQ ID NO: 141 - protein, 9 aa, Artificial Sequence
  Made in a lab
QQYDTLHPS

SEQ ID NO: 142 - protein, 14 aa, Artificial Sequence
  Made in a lab
TGTSSDVGVYDSVS

SEQ ID NO: 143 - protein, 7 aa, Artificial Sequence
  Made in a lab
DVSDRPS

SEQ ID NO: 144 - protein, 10 aa, Artificial Sequence
  Made in a lab
GSYRASSSYV

SEQ ID NO: 145 - protein, 11 aa, Artificial Sequence
  Made in a lab
RASQNIYHYLH

SEQ ID NO: 146 - protein, 7 aa, Artificial Sequence
  Made in a lab
AASTLES

SEQ ID NO: 147 - protein, 9 aa, Artificial Sequence
  Made in a lab
QQTYDTPLT

SEQ ID NO: 148 - protein, 11 aa, Artificial Sequence
  Made in a lab
SGDKLGEKFAS

SEQ ID NO: 149 - protein, 7 aa, Artificial Sequence
  Made in a lab
QDSKRPS

SEQ ID NO: 150 - protein, 10 aa, Artificial Sequence
  Made in a lab
QAWGGSTAYV

SEQ ID NO: 151 - protein, 11 aa, Artificial Sequence
  Made in a lab
RASQSVTTYLA

SEQ ID NO: 152 - protein, 7 aa, Artificial Sequence
  Made in a lab
DASNRAT

SEQ ID NO: 153 - protein, 11 aa, Artificial Sequence
  Made in a lab
QQRSNWPPSIT

SEQ ID NO: 154 - protein, 14 aa, Artificial Sequence
  Made in a lab
TGTSSDVGSYNLVS

SEQ ID NO: 155 - protein, 7 aa, Artificial Sequence
  Made in a lab
EGSKRPS

SEQ ID NO: 156 - protein, 10 aa, Artificial Sequence
  Made in a lab
CSYAGRSTYV

SEQ ID NO: 157 - protein, 11 aa, Artificial Sequence
  Made in a lab
SGNRLEDKYVH

SEQ ID NO: 158 - protein, 7 aa, Artificial Sequence
  Made in a lab
QDNKRPS

SEQ ID NO: 159 - protein, 10 aa, Artificial Sequence
  Made in a lab
QAWDSSTREV

SEQ ID NO: 160 - protein, 11 aa, Artificial Sequence
  Made in a lab
RASQGVSDWLA

SEQ ID NO: 161 - protein, 7 aa, Artificial Sequence
  Made in a lab
GASSLQT

SEQ ID NO: 162 - protein, 9 aa, Artificial Sequence
  Made in a lab
QQAHSFPFT

SEQ ID NO: 163 - protein, 11 aa, Artificial Sequence
  Made in a lab
RASQNINTHLA

SEQ ID NO: 164 - protein, 7 aa, Artificial Sequence
  Made in a lab
GASTRAT

SEQ ID NO: 165 - protein, 10 aa, Artificial Sequence
  Made in a lab
QQYGSSLTWT

SEQ ID NO: 166 - protein, 12 aa, Artificial Sequence
  Made in a lab
RASQSVSGNYLA

SEQ ID NO: 167 - protein, 7 aa, Artificial Sequence
  Made in a lab
GASSRAT

SEQ ID NO: 168 - protein, 9 aa, Artificial Sequence
  Made in a lab
LQHNSYPLT

SEQ ID NO: 169 - protein, 11 aa, Artificial Sequence
  Made in a lab
GGINIGSKSVH

SEQ ID NO: 170 - protein, 8 aa, Artificial Sequence
  Made in a lab
YFDSDRPS

SEQ ID NO: 171 - protein, 11 aa, Artificial Sequence
  Made in a lab
QVWDSRSDQYV

SEQ ID NO: 172 - protein, 11 aa, Artificial Sequence
  Made in a lab
RASQSISSWLA

SEQ ID NO: 173 - protein, 7 aa, Artificial Sequence
  Made in a lab
KASTLES

SEQ ID NO: 174 - protein, 9 aa, Artificial Sequence
  Made in a lab
QQYNSYSLT

SEQ ID NO: 175 - protein, 11 aa, Artificial Sequence
  Made in a lab
RASQSISSYLN

SEQ ID NO: 176 - protein, 7 aa, Artificial Sequence
  Made in a lab
AASSLQS

SEQ ID NO: 177 - protein, 9 aa, Artificial Sequence
  Made in a lab
QQSYSTPLT

SEQ ID NO: 178 - protein, 11 aa, Artificial Sequence
  Made in a lab
RASQSINNYLN

SEQ ID NO: 179 - protein, 7 aa, Artificial Sequence
  Made in a lab
TASTLHS

SEQ ID NO: 180 - protein, 9 aa, Artificial Sequence
  Made in a lab
QQSYATLRT

SEQ ID NO: 181 - protein, 14 aa, Artificial Sequence
  Made in a lab
SGSSSDVGHYDYVS

SEQ ID NO: 182 - protein, 7 aa, Artificial Sequence
  Made in a lab
DVSNRPS

SEQ ID NO: 183 - protein, 10 aa, Artificial Sequence
  Made in a lab
SSYTSSGTRV

SEQ ID NO: 184 - protein, 11 aa, Artificial Sequence
  Made in a lab
RASQSVNNWVA

SEQ ID NO: 185 - protein, 7 aa, Artificial Sequence
  Made in a lab
AASSLQS

SEQ ID NO: 186 - protein, 9 aa, Artificial Sequence
  Made in a lab
QQSYSMPLT

SEQ ID NO: 187 - protein, 5 aa, Artificial Sequence
  Made in a lab
KYSMH

SEQ ID NO: 188 - protein, 17 aa, Artificial Sequence
  Made in a lab
SIWPSGGWTTYADSVKG

SEQ ID NO: 189 - protein, 9 aa, Artificial Sequence
  Made in a lab
GGYYYALDY

SEQ ID NO: 190 - protein, 5 aa, Artificial Sequence
  Made in a lab
FYQMH

SEQ ID NO: 191 - protein, 17 aa, Artificial Sequence
  Made in a lab
GIYPSGGYTKYADSVKG

SEQ ID NO: 192 - protein, 13 aa, Artificial Sequence
  Made in a lab
DLGYGSSWYYFDY

SEQ ID NO: 193 - protein, 5 aa, Artificial Sequence
  Made in a lab
KYSMH

SEQ ID NO: 194 - protein, 16 aa, Artificial Sequence
  Made in a lab
GISPSGYTRYADSVKG

SEQ ID NO: 195 - protein, 9 aa, Artificial Sequence
  Made in a lab
DQLLEAFDI

SEQ ID NO: 196 - protein, 5 aa, Artificial Sequence
  Made in a lab
EYPMN

SEQ ID NO: 197 - protein, 17 aa, Artificial Sequence
  Made in a lab
GIYSSGGLTKYADSVKG

SEQ ID NO: 198 - protein, 10 aa, Artificial Sequence
  Made in a lab
DHYGDYAFDY

SEQ ID NO: 199 - protein, 5 aa, Artificial Sequence
  Made in a lab
LYEMV

SEQ ID NO: 200 - protein, 17 aa, Artificial Sequence
  Made in a lab
GIWPSGGWTQYADSVKG

SEQ ID NO: 201 - protein, 17 aa, Artificial Sequence
  Made in a lab
DLAVAGWDYYYYYGMDV

SEQ ID NO: 202 - protein, 5 aa, Artificial Sequence
  Made in a lab
QYNMI

SEQ ID NO: 203 - protein, 16 aa, Artificial Sequence
  Made in a lab
WISSSGGTEYADSVKG

SEQ ID NO: 204 - protein, 17 aa, Artificial Sequence
  Made in a lab
DRGYGSGSYGAYDAFDI

SEQ ID NO: 205 - protein, 5 aa, Artificial Sequence
  Made in a lab
HYSMG

SEQ ID NO: 206 - protein, 17 aa, Artificial Sequence
  Made in a lab
SIYPSGGSTLYADSVKG

SEQ ID NO: 207 - protein, 9 aa, Artificial Sequence
  Made in a lab
WGVGATFDY

SEQ ID NO: 208 - protein, 5 aa, Artificial Sequence
  Made in a lab
HYMMA

SEQ ID NO: 209 - protein, 17 aa, Artificial Sequence
  Made in a lab
YIYPSGGWTSYADSVKG

SEQ ID NO: 210 - protein, 9 aa, Artificial Sequence
  Made in a lab
FDYTIGFDF

SEQ ID NO: 211 - protein, 5 aa, Artificial Sequence
  Made in a lab
HYGMT

SEQ ID NO: 212 - protein, 17 aa, Artificial Sequence
  Made in a lab
GIRSSGGVTNYADSVKG

SEQ ID NO: 213 - protein, 11 aa, Artificial Sequence
  Made in a lab
EGSGWSKAFDI

SEQ ID NO: 214 - protein, 5 aa, Artificial Sequence
  Made in a lab
HYNMR

SEQ ID NO: 215 - protein, 17 aa, Artificial Sequence
  Made in a lab
SISPSGGFTGYADSVKG

SEQ ID NO: 216 - protein, 18 aa, Artificial Sequence
  Made in a lab
GINYYDSSGYYPPVGMDV

SEQ ID NO: 217 - protein, 5 aa, Artificial Sequence
  Made in a lab
WYNML

SEQ ID NO: 218 - protein, 17 aa, Artificial Sequence
  Made in a lab
SISPSGGYTVYADSVKG

SEQ ID NO: 219 - protein, 14 aa, Artificial Sequence
  Made in a lab
DRGGSPFRPDAFDI

SEQ ID NO: 220 - protein, 5 aa, Artificial Sequence
  Made in a lab
EYDML

SEQ ID NO: 221 - protein, 17 aa, Artificial Sequence
  Made in a lab
SIWPSGGFTQYADSVKG

SEQ ID NO: 222 - protein, 16 aa, Artificial Sequence
  Made in a lab
NYYDFWSGPYYYGMDV

SEQ ID NO: 223 - protein, 5 aa, Artificial Sequence
  Made in a lab
GYVMG

SEQ ID NO: 224 - protein, 17 aa, Artificial Sequence
  Made in a lab
SISPSGGYTLYADSVKG

SEQ ID NO: 225 - protein, 13 aa, Artificial Sequence
  Made in a lab
AFSTRWYWGAFDI

SEQ ID NO: 226 - protein, 5 aa, Artificial Sequence
  Made in a lab
IYHMN

SEQ ID NO: 227 - protein, 17 aa, Artificial Sequence
  Made in a lab
GISSSGGRTNYADSVKG

SEQ ID NO: 228 - protein, 16 aa, Artificial Sequence
  Made in a lab
SYRAAGWVDYYYGMDV

SEQ ID NO: 229 - protein, 5 aa, Artificial Sequence
  Made in a lab
LYDMH

SEQ ID NO: 230 - protein, 17 aa, Artificial Sequence
  Made in a lab
RIYSSGGTTQYADSVKG

SEQ ID NO: 231 - protein, 12 aa, Artificial Sequence
  Made in a lab
DPGYGSHHSFDY

SEQ ID NO: 232 - protein, 5 aa, Artificial Sequence
  Made in a lab
SYYMT

SEQ ID NO: 233 - protein, 17 aa, Artificial Sequence
  Made in a lab
GIYSSGGPTQYADSVKG

SEQ ID NO: 234 - protein, 8 aa, Artificial Sequence
  Made in a lab
AGGDAFDI

SEQ ID NO: 235 - protein, 5 aa, Artificial Sequence
  Made in a lab
SYEMF

SEQ ID NO: 236 - protein, 17 aa, Artificial Sequence
  Made in a lab
SISPSGGYTYYADSVKG

SEQ ID NO: 237 - protein, 9 aa, Artificial Sequence
  Made in a lab
MTTSGFHLI

SEQ ID NO: 238 - protein, 5 aa, Artificial Sequence
  Made in a lab
DYPMQ

SEQ ID NO: 239 - protein, 17 aa, Artificial Sequence
  Made in a lab
WIGPSGGWTVYADSVKG

SEQ ID NO: 240 - protein, 8 aa, Artificial Sequence
  Made in a lab
DDGIAGFL

SEQ ID NO: 241 - protein, 5 aa, Artificial Sequence
  Made in a lab
WYLMH

SEQ ID NO: 242 - protein, 17 aa, Artificial Sequence
  Made in a lab
GIWPSGGHTLYADSVKG

SEQ ID NO: 243 - protein, 16 aa, Artificial Sequence
  Made in a lab
EPLLWFGELSYNWFDP

SEQ ID NO: 244 - protein, 6 aa, Artificial Sequence
  Made in a lab
YYENMA

SEQ ID NO: 245 - protein, 17 aa, Artificial Sequence
  Made in a lab
GIYPSGGLTYYADSVKG

SEQ ID NO: 246 - protein, 13 aa, Artificial Sequence
  Made in a lab
SRRYYDSSDAFDI

SEQ ID NO: 247 - protein, 5 aa, Artificial Sequence
  Made in a lab
TYVMY

SEQ ID NO: 248 - protein, 17 aa, Artificial Sequence
  Made in a lab
GIGPSGGNTFYADSVKG

SEQ ID NO: 249 - protein, 14 aa, Artificial Sequence
  Made in a lab
DPGDFWSGYYGMDV

SEQ ID NO: 250 - protein, 5 aa, Artificial Sequence
  Made in a lab
FYGMA

SEQ ID NO: 251 - protein, 17 aa, Artificial Sequence
  Made in a lab
SIYPSGGYTDYADSVKG

SEQ ID NO: 252 - protein, 13 aa, Artificial Sequence
  Made in a lab
SAGGWIGGGAFDI

SEQ ID NO: 253 - protein, 5 aa, Artificial Sequence
  Made in a lab
KYPMM

SEQ ID NO: 254 - protein, 17 aa, Artificial Sequence
  Made in a lab
YIYPSGGKTAYADSVKG

SEQ ID NO: 255 - protein, 17 aa, Artificial Sequence
  Made in a lab
YGSGSYYLYYYYYYMDV

SEQ ID NO: 256 - protein, 5 aa, Artificial Sequence
  Made in a lab
WYSMW

SEQ ID NO: 257 - protein, 17 aa, Artificial Sequence
  Made in a lab
YIVPSGGETIYADSVKG

SEQ ID NO: 258 - protein, 16 aa, Artificial Sequence
  Made in a lab
NLGEGFWSDYYPPLDY

SEQ ID NO: 259 - protein, 5 aa, Artificial Sequence
  Made in a lab
HYGMH

SEQ ID NO: 260 - protein, 15 aa, Artificial Sequence
  Made in a lab
SIYPGMTQYADSVKG

SEQ ID NO: 261 - protein, 11 aa, Artificial Sequence
  Made in a lab
DRGSGIDAFDI

SEQ ID NO: 262 - protein, 5 aa, Artificial Sequence
  Made in a lab
WYDML

SEQ ID NO: 263 - protein, 17 aa, Artificial Sequence
  Made in a lab
VISPSGGRTFYADSVKG

SEQ ID NO: 264 - protein, 16 aa, Artificial Sequence
  Made in a lab
TRSMYSSSWYGAPPTH

SEQ ID NO: 265 - protein, 5 aa, Artificial Sequence
  Made in a lab
WYKMH

SEQ ID NO: 266 - protein, 17 aa, Artificial Sequence
  Made in a lab
GISSSGGLTKYADSVKG

SEQ ID NO: 267 - protein, 11 aa, Artificial Sequence
  Made in a lab
ERRGDGGAFDI

SEQ ID NO: 268 - protein, 5 aa, Artificial Sequence
  Made in a lab
EYTMY

SEQ ID NO: 269 - protein, 17 aa, Artificial Sequence
  Made in a lab
YISPSGGTTNYADSVKG

SEQ ID NO: 270 - protein, 13 aa, Artificial Sequence
  Made in a lab
GAWGDIYYYGMDV

SEQ ID NO: 271 - protein, 5 aa, Artificial Sequence
  Made in a lab
SYWMH

SEQ ID NO: 272 - protein, 17 aa, Artificial Sequence
  Made in a lab
SIYPSGGSTEYADSVKG

SEQ ID NO: 273 - protein, 6 aa, Artificial Sequence
  Made in a lab
GIWFDP

SEQ ID NO: 274 - protein, 5 aa, Artificial Sequence
  Made in a lab
RYGMM

SEQ ID NO: 275 - protein, 17 aa, Artificial Sequence
  Made in a lab
YISSSGGFTRYADSVKG

SEQ ID NO: 276 - protein, 12 aa, Artificial Sequence
  Made in a lab
VGGYSYGPHFDF

SEQ ID NO: 277 - protein, 5 aa, Artificial Sequence
  Made in a lab
WYHMI

SEQ ID NO: 278 - protein, 17 aa, Artificial Sequence
  Made in a lab
WISPSGGFTKYADSVKG

SEQ ID NO: 279 - protein, 14 aa, Artificial Sequence
  Made in a lab
YDSRAAAGTNAFDI

SEQ ID NO: 280 - protein, 5 aa, Artificial Sequence
  Made in a lab
PYKMV

SEQ ID NO: 281 - protein, 17 aa, Artificial Sequence
  Made in a lab
GISPSGGYTYYADSVKG

SEQ ID NO: 282 - protein, 14 aa, Artificial Sequence
  Made in a lab
GGYGWSYYYYGMDV

SEQ ID NO: 283 - protein, 5 aa, Artificial Sequence
  Made in a lab
NYWMY

SEQ ID NO: 284 - protein, 17 aa, Artificial Sequence
  Made in a lab
VISSSGGHTFYADSVKG

SEQ ID NO: 285 - protein, 9 aa, Artificial Sequence
  Made in a lab
DYEGGSNDY

SEQ ID NO: 286 - protein, 5 aa, Artificial Sequence
  Made in a lab
NYAMS

SEQ ID NO: 287 - protein, 17 aa, Artificial Sequence
  Made in a lab
SIYSSGGYTAYADSVKG

SEQ ID NO: 288 - protein, 11 aa, Artificial Sequence
  Made in a lab
VPHVFRGELDY

SEQ ID NO: 289 - protein, 5 aa, Artificial Sequence
  Made in a lab
FYTMW

SEQ ID NO: 290 - protein, 17 aa, Artificial Sequence
  Made in a lab
SIYPSGGQTLYADSVKG

SEQ ID NO: 291 - protein, 13 aa, Artificial Sequence
  Made in a lab
PDSYGYLYYGMDV

SEQ ID NO: 292 - protein, 5 aa, Artificial Sequence
  Made in a lab
WYPME

SEQ ID NO: 293 - protein, 17 aa, Artificial Sequence
  Made in a lab
GIGPSGGQTTYADSVKG

SEQ ID NO: 294 - protein, 6 aa, Artificial Sequence
  Made in a lab
GSYSFI

SEQ ID NO: 295 - protein, 5 aa, Artificial Sequence
  Made in a lab
LYKMA

SEQ ID NO: 296 - protein, 17 aa, Artificial Sequence
  Made in a lab
VIGSSGGRTPYADSVKG

SEQ ID NO: 297 - protein, 16 aa, Artificial Sequence
  Made in a lab
APLSGWFGQAHDAFDI

SEQ ID NO: 298 - protein, 5 aa, Artificial Sequence
  Made in a lab
TYEMN

SEQ ID NO: 299 - protein, 17 aa, Artificial Sequence
  Made in a lab
GIVPSGGVTYYADSVKG

SEQ ID NO: 300 - protein, 13 aa, Artificial Sequence
  Made in a lab
GPYSYGHDYGMDV

SEQ ID NO: 301 - protein, 5 aa, Artificial Sequence
  Made in a lab
VYPMH

SEQ ID NO: 302 - protein, 17 aa, Artificial Sequence
  Made in a lab
SIYSSGGFTMYADSVKG

SEQ ID NO: 303 - protein, 9 aa, Artificial Sequence
  Made in a lab
EGVADAFDI

SEQ ID NO: 304 - protein, 5 aa, Artificial Sequence
  Made in a lab
SYTMH

SEQ ID NO: 305 - protein, 17 aa, Artificial Sequence
  Made in a lab
SISPSGGMTFYADSVKG

SEQ ID NO: 306 - protein, 11 aa, Artificial Sequence
  Made in a lab
TYDFWSGYFDY

SEQ ID NO: 307 - protein, 5 aa, Artificial Sequence
  Made in a lab
TYEMG

SEQ ID NO: 308 - protein, 17 aa, Artificial Sequence
  Made in a lab
VIWSSGGHTWYADSVKG

SEQ ID NO: 309 - protein, 16 aa, Artificial Sequence
  Made in a lab
SNQGDFWSGYPFAFDI

SEQ ID NO: 310 - protein, 5 aa, Artificial Sequence
  Made in a lab
NYNMY

SEQ ID NO: 311 - protein, 17 aa, Artificial Sequence
  Made in a lab
YISPSGGMTKYADSVKG

SEQ ID NO: 312 - protein, 11 aa, Artificial Sequence
  Made in a lab
RGVLGYYGMDV

SEQ ID NO: 313 - protein, 5 aa, Artificial Sequence
  Made in a lab
LYSMN

SEQ ID NO: 314 - protein, 17 aa, Artificial Sequence
  Made in a lab
SISSSGGATLYADSVKG

SEQ ID NO: 315 - protein, 14 aa, Artificial Sequence
  Made in a lab
DLISSGYYPDAFDI

SEQ ID NO: 316 - protein, 5 aa, Artificial Sequence
  Made in a lab
QYMMH

SEQ ID NO: 317 - protein, 17 aa, Artificial Sequence
  Made in a lab
SISSSGGWTSYADSVKG

SEQ ID NO: 318 - protein, 19 aa, Artificial Sequence
  Made in a lab
PLALGYDFWSGYQAAGFDY

SEQ ID NO: 319 - protein, 5 aa, Artificial Sequence
  Made in a lab
WYSMV

SEQ ID NO: 320 - protein, 17 aa, Artificial Sequence
  Made in a lab
SIVPSGGLTWYADSVKG

SEQ ID NO: 321 - protein, 10 aa, Artificial Sequence
  Made in a lab
DVYGDYYFDN

SEQ ID NO: 322 - protein, 5 aa, Artificial Sequence
  Made in a lab
YYNMT

SEQ ID NO: 323 - protein, 17 aa, Artificial Sequence
  Made in a lab
SISPSGGRTGYADSVKG

SEQ ID NO: 324 - protein, 10 aa, Artificial Sequence
  Made in a lab
VSGFYAAFDY

SEQ ID NO: 325 - protein, 5 aa, Artificial Sequence
  Made in a lab
WYWMT

SEQ ID NO: 326 - protein, 17 aa, Artificial Sequence
  Made in a lab
SISPSGGHTSYADSVKG

SEQ ID NO: 327 - protein, 11 aa, Artificial Sequence
  Made in a lab
SSGWYEDYFDY

SEQ ID NO: 328 - protein, 5 aa, Artificial Sequence
  Made in a lab
PYEMA

SEQ ID NO: 329 - protein, 17 aa, Artificial Sequence
  Made in a lab
VIGPSGGYTEYADSVKG

SEQ ID NO: 330 - protein, 14 aa, Artificial Sequence
  Made in a lab
GYDFWSGYYDAFDI

SEQ ID NO: 331 - protein, 5 aa, Artificial Sequence
  Made in a lab
SYFMG

SEQ ID NO: 332 - protein, 17 aa, Artificial Sequence
  Made in a lab
SIWPSGGNTTYADSVKG

SEQ ID NO: 333 - protein, 10 aa, Artificial Sequence
  Made in a lab
HVGWGRYFDY

SEQ ID NO: 334 - protein, 5 aa, Artificial Sequence
  Made in a lab
AYRMI

SEQ ID NO: 335 - protein, 17 aa, Artificial Sequence
  Made in a lab
YISSSGGRTDYADSVKG

SEQ ID NO: 336 - protein, 15 aa, Artificial Sequence
  Made in a lab
GGLRYFDWLAPSMDY

SEQ ID NO: 337 - protein, 5 aa, Artificial Sequence
  Made in a lab
AYSMV

SEQ ID NO: 338 - protein, 17 aa, Artificial Sequence
  Made in a lab
YIYPSGGITTYADSVKG

SEQ ID NO: 339 - protein, 7 aa, Artificial Sequence
  Made in a lab
EGQVFDI

SEQ ID NO: 340 - protein, 5 aa, Artificial Sequence
  Made in a lab
NYAMG

SEQ ID NO: 341 - protein, 17 aa, Artificial Sequence
  Made in a lab
RIVPSGGMTSYADSVKG

SEQ ID NO: 342 - protein, 9 aa, Artificial Sequence
  Made in a lab
DDFWSGMDV

SEQ ID NO: 343 - protein, 5 aa, Artificial Sequence
  Made in a lab
LYNMQ

SEQ ID NO: 344 - protein, 17 aa, Artificial Sequence
  Made in a lab
GISLSGGKTFYADSVKG

SEQ ID NO: 345 - protein, 12 aa, Artificial Sequence
  Made in a lab
DYGVATLDAFDI

SEQ ID NO: 346 - protein, 5 aa, Artificial Sequence
  Made in a lab
AYTMH

SEQ ID NO: 347 - protein, 17 aa, Artificial Sequence
  Made in a lab
SIYPSGGTTPYADSVKG

SEQ ID NO: 348 - protein, 18 aa, Artificial Sequence
  Made in a lab
VVNIDFWSGYNMRSAFDI

SEQ ID NO: 349 - protein, 5 aa, Artificial Sequence
  Made in a lab
DYLMG

SEQ ID NO: 350 - protein, 17 aa, Artificial Sequence
  Made in a lab
VISSSGGPTAYADSVKG

SEQ ID NO: 351 - protein, 13 aa, Artificial Sequence
  Made in a lab
VGLDYGILGAFDI

SEQ ID NO: 352 - protein, 5 aa, Artificial Sequence
  Made in a lab
EYGMS

SEQ ID NO: 353 - protein, 17 aa, Artificial Sequence
  Made in a lab
SIRSSGGWTKYADSVKG

SEQ ID NO: 354 - protein, 11 aa, Artificial Sequence
  Made in a lab
GLGATSGEFDY

SEQ ID NO: 355 - protein, 5 aa, Artificial Sequence
  Made in a lab
KYDMW

SEQ ID NO: 356 - protein, 17 aa, Artificial Sequence
  Made in a lab
SIWPSGGWTSYADSVKG

SEQ ID NO: 357 - protein, 12 aa, Artificial Sequence
  Made in a lab
SRGSPWYGDFDH

SEQ ID NO: 358 - protein, 5 aa, Artificial Sequence
  Made in a lab
MYTMH

SEQ ID NO: 359 - protein, 17 aa, Artificial Sequence
  Made in a lab
WISPSGGWTKYADSVKG

SEQ ID NO: 360 - protein, 9 aa, Artificial Sequence
  Made in a lab
SPWGGPFDY

SEQ ID NO: 361 - protein, 5 aa, Artificial Sequence
  Made in a lab
QYFMM

SEQ ID NO: 362 - protein, 17 aa, Artificial Sequence
  Made in a lab
SISPSGGYTQYADSVKG

SEQ ID NO: 363 - protein, 14 aa, Artificial Sequence
  Made in a lab
TGDYTRYYSYGMDV

SEQ ID NO: 364 - protein, 5 aa, Artificial Sequence
  Made in a lab
GYSMA

SEQ ID NO: 365 - protein, 17 aa, Artificial Sequence
  Made in a lab
GIYSSGGWTWYADSVKG

SEQ ID NO: 366 - protein, 15 aa, Artificial Sequence
  Made in a lab
DQSFSYDSSLDAFDI

SEQ ID NO: 367 - protein, 5 aa, Artificial Sequence
  Made in a lab
LYGMH

SEQ ID NO: 368 - protein, 17 aa, Artificial Sequence
  Made in a lab
SIVPSGGLTRYADSVKG

SEQ ID NO: 369 - protein, 15 aa, Artificial Sequence
  Made in a lab
LAYYDFWSGRDAFDI

SEQ ID NO: 370 - protein, 5 aa, Artificial Sequence
  Made in a lab
HYGMD

SEQ ID NO: 371 - protein, 17 aa, Artificial Sequence
  Made in a lab
SIYSSGGYTLYADSVKG

SEQ ID NO: 372 - protein, 9 aa, Artificial Sequence
  Made in a lab
RTWADAFDV

SEQ ID NO: 373 - protein, 105 aa, Artificial Sequence
  Made in a lab
QSELTQPPSVSVSPGQTATITCSGEKLGDIYASWYQQKPGQSPVLVIYQDTKRPSGIPVRFSGSNSGNTATLTISGTQAMDEADYYCQAWDSSTVFGGGTKLTVL

SEQ ID NO: 374 - protein, 110 aa, Artificial Sequence
  Made in a lab
QSALTQPASVSGSPGQSITISCSGTDSDVGGYNHVSWYQQHPGKAPKLIIYDVDHRPSGISNRFSGSKSGNTASLTISGLQAEDEADYYCSSYRSGSTYVFGTATKVTVL

SEQ ID NO: 375 - protein, 108 aa, Artificial Sequence
  Made in a lab
QDIQMTQSPLSLSASVGDRVTITCRASQSISSYLNWYQQKPGEAPKLLIYAASALQSGVPSRFSGSGLGTVFTLTITSLQPEDSATYYCQQSYSPPVTFGGGTKVDIK

SEQ ID NO: 376 - protein, 107 aa, Artificial Sequence
  Made in a lab
QDIQMTQSPSTLSASVGDRVTITCRASQSISSWLAWYQQKPGKAPKLLIYKASSLESGVPSRFSGSGSGTEFTLTISSLQPDDFATYYCQQYNSYWTFGQGTKVEIK

SEQ ID NO: 377 - protein, 109 aa, Artificial Sequence
  Made in a lab
QDIQMTQSPATLSLSPGERATLSCRASQSVSSYLAWYQQKPGQAPRLLIYDASNRATGIPARFSGSGSGTDFTLTISSLEPEDSAVYYCQQRSNWPPFTFGGGTKVEIK

SEQ ID NO: 378 - protein, 108 aa, Artificial Sequence
  Made in a lab
QDIQMTQSPSSLSASVGDRVTITCQTSQSIDRYLNWYQQKAGEAPKLLIYAASSLQSGVPSRFSGSGSGTDFTLTISSLQPEDFASYYCQQSYRTPRTFGQGTKVEIK

SEQ ID NO: 379 - protein, 110 aa, Artificial Sequence
  Made in a lab
QDIQMTQSPGTLSLSPGERATLSCRASQSVSSSYLAWYQQKPGQAPRLLIYGASSRATGIPDRFSGSGSGTDFTLTISRLEPEDFAVYYCQQYGSSPLWTFGQGTKVEIK

SEQ ID NO: 380 - protein, 108 aa, Artificial Sequence
  Made in a lab
QDIQMTQSPSSLSASVGDRVTITCRASQSISSYLNWYQQKPGKAPKLLIYAASSLQSGVPSRFSGSGSGTDFTLTISSLQPEDFATYYCQQSYSTPRTFGQGTKVEIK

SEQ ID NO: 381 - protein, 110 aa, Artificial Sequence
  Made in a lab
QDIQMTQSPATLSLSPGERATLSCRASQSISTSLAWYQQIPGQAPRLLMYDASKRASGIPARFSGSGSGTDFTLTISSLEPEDSAVYYCQLRINWPPEFTFGPGTKVEIK

SEQ ID NO: 382 - protein, 108 aa, Artificial Sequence
  Made in a lab
QDIQMTQSPSSVSASVGDRVTITCRASRGVITWLNWYQQKPGRVPSPLIFGASTLQTGVPSRFSGSGSGTDFTLTINDLQPEDFATYYCQQTHSFPLTFGGGTKVEIK

SEQ ID NO: 383 - protein, 106 aa, Artificial Sequence
  Made in a lab
QSALTQPPSVSVSPGQTARITCSGDKLGEKYVSWYQQRSGQSPLLVISQDTKRPSGIPERFSGSNSGNTATLTISGAQAADEADYYCQTWDSDTYVFGSGSTVTVL

SEQ ID NO: 384 - protein, 108 aa, Artificial Sequence
  Made in a lab
QDIQMTQSPSSLSASVGDRVTITCRASQSISSYLNWYQQKPGKAPKLLIYAASSLQSGVPSRFSGSGSGTDFTLTISSLQPEDFATYYCQQSYSTLWTFGQGTKVEIK

SEQ ID NO: 385 - protein, 108 aa, Artificial Sequence
  Made in a lab
QDIQMTQSPATLSLSPGERATLSCRASQSVRSYLAWYQQKPGQAPRLLIYDASNRATGIPARFSGSGSGTDFTLTITSLQPEDIATYYCQQYDNLPLTFGGGTKVEIK

SEQ ID NO: 386 - protein, 108 aa, Artificial Sequence
  Made in a lab
QDIQMTQSPSSLSAFVGDRVTITCRTSQSVATYVNWYQQKPGEGPKLLIYAASSLQSGVPSRFRGSGSGTDFTLTIGSLQPEDFATYYCQQSYSVPITFGQGTRLDIK

SEQ ID NO: 387 - protein, 109 aa, Artificial Sequence
  Made in a lab
QDIQMTQSPSTLSASVGDRVTITCRASQSMSNWLAWYQQKPGKAPKLLIYDVFTLKSGVPSRFSGSRSGTEFTLTISSLQPDDFATYYCQQYSDYSGITFGPGTEVDIR

SEQ ID NO: 388 - protein, 111 aa, Artificial Sequence
  Made in a lab
QSVLTQPPSASGTPGQRVTISCSGSSSNIGSKVVYWYQQVPGTAPKLLIYRNDQRPSGVPDRFSGSKSGTSASLAISGLRSEDEADYYCAAWDDSLSGRWVFGGGTKLTVL

SEQ ID NO: 389 - protein, 108 aa, Artificial Sequence
  Made in a lab
QDIQMTQSPATLSASVGDRVTITCRASQSISSWLAWYQQKPGKAPKLLIYKASGLESGVPSRFSGSGSGTEFTLTISSLQPDDFATYYCQQYNSYPFTFGPGTKVDIK

SEQ ID NO: 390 - protein, 108 aa, Artificial Sequence
  Made in a lab
QDIQMTQSPLSLSASVGDRVTITCQASRDISIYLNWYQQKPGKVPKLLIFGASTLRSGVPSRFSGSGSGTDFTLTITSLQPEDVATYYCQKYNSAPYTFGPGTKVEIR

SEQ ID NO: 391 - protein, 108 aa, Artificial Sequence
  Made in a lab
QDIQMTQSPSSVSASVGDRVTITCRASQGISSWLAWYQQKPGKAPKLLIYAASSLQSGVPSRFSGSGSGTDFTLTISSLQPEDFATYYCQQANSFPLTFGGGTKVEIK

SEQ ID NO: 392 - protein, 108 aa, Artificial Sequence
  Made in a lab
QDIQMTQSPATLSLSPGERATLSCRASQSINTYLAWYQQKPGHPPRLLIYDASNRATGIPDRFSGSGSGTDFTLTISRLEPEDFVVYYCQQYGRSRYTFGQGTKLEIK

SEQ ID NO: 393 - protein, 108 aa, Artificial Sequence
  Made in a lab
QDIQMTQSPSSLSASVGDRVTITCRASQGISNYLAWYQQKPGKVPKLLIYAASTLQSGVPSRFSGSGSGTEFTLTISSLQPEDFATYYCQQSDNIPYTFGLGTKLEIK

SEQ ID NO: 394 - protein, 110 aa, Artificial Sequence
  Made in a lab
QSELTQPPSASGTPGQRVTISCSGSSSNIGSNTVNWYQQLPGTAPKLLIYSNNQRPSGVPDRFSGSKSGTSASLAISGLQSEDEADYYCAAWDDSLNGYVFGIGTKVTVL

SEQ ID NO: 395 - protein, 108 aa, Artificial Sequence
  Made in a lab
QDIQMTQSPSSLSASVGDSVTIACRASQSISTYLNWYQQKPGQAPKLLIYEATNLQSGVPSRFSGSGSGTDFTLTISSLQPEDVATYYCQQANNFPFTFGPGTKVDIK

SEQ ID NO: 396 - protein, 110 aa, Artificial Sequence
  Made in a lab
QSVLTQPPSASGTPGQRVTISCSGSSSNIGGNAVNWYQQLPGTAPKLVLYSSNHRPSGVPDRFSGSRSGTSASLAISGLQSQDEADYYCAAWDDSLNGPLFGGGTKLTVL

SEQ ID NO: 397 - protein, 108 aa, Artificial Sequence
  Made in a lab
QSELTQPPSVSVSPGQTATISCSGEKLGDRYAWWYQQKAGQSPVLVIYQDTKRPSGVPDRFSGSNSGTSASLVISGLQSEDEADYYCAAWDDSLKGVVFGGGSKLTVL

SEQ ID NO: 398 - protein, 110 aa, Artificial Sequence
  Made in a lab
QSELTQPPSASGTPGQRVTISCSGRSSNIGSNSVNWYQQLPGTAPKLLIYSNNHRPSGVPDRFSGSKSGTSASLAISGLQSEDEADYYCAAWDDSLYQGVFGGGTKLTVL

SEQ ID NO: 399 - protein, 108 aa, Artificial Sequence
  Made in a lab
QDIQMTQSPSSLSASVGDRVTITCRASQSISSYLNWYQQKPGKAPKLLIYAASSLQSGVPSKFSGSGSGTDFTLTISSLLPEDFATYYCQQYEYFPPTFGQGTKVEIK

SEQ ID NO: 400 - protein, 109 aa, Artificial Sequence
  Made in a lab
QDIQMTQSPDSLSLSPGERATLSCRASQSVSSSYLAWYQQKPGQAPRLLIYGASSRATGIPDRFSGSGSGTDFTLTISRLEPEDFAVYYCQQYGSSSLTFGGGTEVEIK

SEQ ID NO: 401 - protein, 108 aa, Artificial Sequence
  Made in a lab
QDIQMTQSPATLSASVGDRVTITCRSSQRISGYLNWYQQQPGKAPKLLIYAASTLQSGVPSRISGSGSGTDFSLIISSLQPEDVATYYCQQSYSPPFTFGQGTKVEIK

SEQ ID NO: 402 - protein, 108 aa, Artificial Sequence
  Made in a lab
QDIQMTQSPSTLSASVGDRVTITCRASQSISTWLAWFQQKPGKAPKLLIYKASSLQSGVPSRFSGSGSGTDFTLTISSLQPEDFATYYCQQYKSYPFTFGGGTKVEIK

SEQ ID NO: 403 - protein, 108 aa, Artificial Sequence
  Made in a lab
QDIQMTQSPSSLSASVGDSVTITCQASQDIRSYLNWFQQKPGKAPKLLIYDTVNLQTGVPSRFSGSGSGTDYSFTINNLQPEDFATYYCQQYEYLPITFGQGTRLEIK

SEQ ID NO: 404 - protein, 108 aa, Artificial Sequence
  Made in a lab
QDIQMTQSPSSLSASVGDRVTITCRASQSISNYLNWYQQKSGKAPNLLMYAASSLHSGVSSRFSGSGSGTEFTLTISSLQPEDYATYYCQQSYSTSGTFGQGTKVEIK

SEQ ID NO: 405 - protein, 108 aa, Artificial Sequence
  Made in a lab
QDIQMTQSPSSLSASVGDRVTITCRASQSISSYLNWYQQKPGKAPKLLIYAASSLQSGVPSRFSGSGSGTDFTLTISSLQPEDFATYYCQQSYSTPVTFGGGTKVEIK

SEQ ID NO: 406 - protein, 109 aa, Artificial Sequence
  Made in a lab
QDIQMTQSPSSLSASVGDRVAITCRASQSIDTYLNWYQHKPGKAPKLLIYAASSLQSGVPSRFSGSGSGTDFTLTISGLQPEDFASYFCQQSYSSPGITFGGGTRVEIK

SEQ ID NO: 407 - protein, 108 aa, Artificial Sequence
  Made in a lab
QDIQMTQSPSSLSASVGDRVTITCRASQSIGTYLNWYQQKPGKAPNLLIYGTSSLQRGVPSRFSGSGSGTDFTLTISTLQPEDFVHYYCQQSYTSPPTFGQGTKVEVK

SEQ ID NO: 408 - protein, 106 aa, Artificial Sequence
  Made in a lab
QYELTQSPSVSVSPGQTASIPCSGDQLGGKFTSWYQQKAGQSPLLVIYQDTKRPSGIPERFSGSNSGNTATLTITGTQAMDEADYYCLVWDSNTYVFGPGTKVTVL

SEQ ID NO: 409 - protein, 108 aa, Artificial Sequence
  Made in a lab
QYELTQPPSVSVAPGQTARITCGGNNIGSKSVHWYQQKPGQAPVLVVYDDSDRPSGIPERFSGSNSGNTATLTVSRVEAGDEADYYCQVWDSSGGLQVFGTGTKVTVL

SEQ ID NO: 410 - protein, 108 aa, Artificial Sequence
  Made in a lab
QDIQMTQSPSTLSASVGDRVTITCRASQSISSWLAWYQQKPGKAPKLLIYKASNLESEVPSRFSGSGSGTEFTLTISSLQPDDFATYYCQQYNAYPFIFGPGTKVDIK

SEQ ID NO: 411 - protein, 107 aa, Artificial Sequence
  Made in a lab
QDIQMTQSPSTLSASVGDRVTITCRASQSISSWLAWYQQKPGKAPKLLIYKASSLESGVPSRFSGSGSGTEFTLTISSLQPDDFATYHCQQYKSYWTFGQGTKVEIK

SEQ ID NO: 412 - protein, 110 aa, Artificial Sequence
  Made in a lab
QSELTQPPSVSEAPRQRVTVSCSGSPSNIGSNSVNWYQQLPGKAPKVVIYYDDLVPSGVSDRFSGSKSGTSASLAISGLQSEDEADYYCAAWDDRLNGWVFGGGTKLTVL

SEQ ID NO: 413 - protein, 108 aa, Artificial Sequence; identical to SEQ ID NO: 391
  Made in a lab

SEQ ID NO: 414 - protein, 108 aa, Artificial Sequence
  Made in a lab
QDIQMTQSPSSLSASVGDRVTITCRASQSISSYLNWYQQKPGKAPKLLIYAASSLQSGVPSRFSGSGSGTDFTLTISSLQPEDFATYYCQQSYSTPYTFGQGTKLEIK

SEQ ID NO: 415 - protein, 108 aa, Artificial Sequence
  Made in a lab
QDIQMTQSPGTLSLSPGERATLSCRASQSVSSSYLAWYQQKPGQAPRLLIYGASNRVTGIPDRFSGSGSGTDFTLTISRLEPEDSAVYYCHQYGSQYTFGPGTKLEIK

SEQ ID NO: 416 - protein, 108 aa, Artificial Sequence
  Made in a lab
QDIQMTQSPSSLSASVGDRVTISCQASQHISNFLNWYQQKPGKAPKLLIYDTSNLRSGVPSRFSGSGSGTDFTFTISSLQPEDIATYYCQQYDNFPLTFGGGTKVEIK

SEQ ID NO: 417 - protein, 110 aa, Artificial Sequence
  Made in a lab
QSELTQPPSVSEAPGQRVTISCSGSTSNIGNNAVIWYQQLPGKAPKLLIYYDDLLPSGVSDRFSGSKSGTSGSLAISGLQSEDEADYYCASWDDNLNGPLFGGGTKLTVL

SEQ ID NO: 418 - protein, 108 aa, Artificial Sequence
  Made in a lab
QDIQMTQSPSTLSASVGDRVTITCRASQSISSWLAWYQQKPGKAPKLLIYQASTLESGVPSRFSGSGSGTDFTLTISSLQPEDFATYYCQQANSFPITFGGGTKVEIN

SEQ ID NO: 419 - protein, 108 aa, Artificial Sequence
  Made in a lab
QDIQMTQSPSSLSASVGDRVTITCQASQDITNYLNWYLHKPGKAPKLLIYDASNLQTGVPSRFSGSGSGTDFTFTITSLQPEDFGTYYCQQYDTLHPSFGPGTTVDIK

SEQ ID NO: 420 - protein, 110 aa, Artificial Sequence
  Made in a lab
QSALTQPPSASGSPGQSVTISCTGTSSDVGVYDSVSWYQQHPGKAPKLMIYDVSDRPSGVSNRFSGSKSGYTASLTISALQAEDEADYYCGSYRASSSYVFGTGTKVTVL

SEQ ID NO: 421 - protein, 108 aa, Artificial Sequence
  Made in a lab
QDIQMTQSPSSLSASVGDRVTITCRASQNIYHYLHWYQQKPGKAPKLLIYAASTLESGVPSRFSGSGSGTDFTLTINSLQPEDFATYYCQQTYDTPLTFGGGSKVEVK

SEQ ID NO: 422 - protein, 107 aa, Artificial Sequence
  Made in a lab
QSALTQPPSVSVSPGQTASITCSGDKLGEKFASWYQQRPGQSPILVIYQDSKRPSGIPERFSGSNSGNTATLTISGTQTMDEADYYCQAWGGSTAYVFGSGTKVTVL

SEQ ID NO: 423 - protein, 110 aa, Artificial Sequence
  Made in a lab
QDIQMTQSPATLSLSPGERATLSCRASQSVTTYLAWYQQRPGQAPRLLIYDASNRATGIPARFSGSGSGTDFTLTISSVEPEDYAVYYCQQRSNWPPSITFGQGTRLESK

SEQ ID NO: 424 - protein, 110 aa, Artificial Sequence
  Made in a lab
QSALTQPASVSGSPGQSITISCTGTSSDVGSYNLVSWYQQHPGKAPKVMIYEGSKRPSGVSNRFSGSKSGNTASLTISGLQAEDEADYYCCSYAGRSTYVFGTGTKVTVL

SEQ ID NO: 425 - protein, 107 aa, Artificial Sequence
  Made in a lab
QSELTQTPSVSVSPGQTASITCSGNRLEDKYVHWYQQKPGQSPVLVLYQDNKRPSGIPERFSGSNSGNTATLTISETQTLDEADYYCQAWDSSTREVFGGGTKLTVL

SEQ ID NO: 426 - protein, 108 aa, Artificial Sequence
  Made in a lab
QDIQMTQSPSSVSASVGDTVTITCRASQGVSDWLAWYQQKPGKAPNLLIYGASSLQTGVPSRFSGGGSGTDFTLTISSLQPEDFATYYCQQAHSFPFTFGGGTRVEIK

SEQ ID NO: 427 - protein, 109 aa, Artificial Sequence
  Made in a lab
QDIQMTQSPATLSVSPGERATLSCRASQNINTHLAWYQQKPGQAPRLLIFGASTRATGIPARFSGSGSGTEFTLTISSLQSEDFTVYYCQQYGSSLTWTFGQGTKVEIK

SEQ ID NO: 428 - protein, 109 aa, Artificial Sequence
  Made in a lab
QDIQMTQSPGTLSLSPGERATLSCRASQSVSGNYLAWYQQKLGQAPRLLIYGASSRATGTPDRFSGSGSGTEFTLTISSLQPEDFATYYCLQHNSYPLTSGSGTEFTLT

SEQ ID NO: 429 - protein, 108 aa, Artificial Sequence
  Made in a lab
QSELTQPPSVSVAPGETATVTCGGINIGSKSVHWYQQKPGQAPVVVMYFDSDRPSGIPERFSGSNSGDTATLTISRVEAGDEADYYCQVWDSRSDQYVFGFGTKVTVL

SEQ ID NO: 430 - protein, 108 aa, Artificial Sequence
  Made in a lab
QDIQMTQSPSTLSASVGDRVTITCRASQSISSWLAWYQQKPGKAPKLLIYKASTLESGVPSRFSAGGSGTEFTLTISSLQPDDFGTYYCQQYNSYSLTFGGGTKVEII

SEQ ID NO: 431 - protein, 108 aa, Artificial Sequence
  Made in a lab
QDIQMTQSPSSLSASVGDRVTITCRASQSISSYLNWYQQKPGKAPKLLIYAASSLQSGVPSRFSGSGSGTDFTLTISSLQPEDFATYYCQQSYSTPLTFGGGTKVEIK

SEQ ID NO: 432 - protein, 108 aa, Artificial Sequence
  Made in a lab
QDIQMTQSPSSLSASVGDRVTITCRASQSINNYLNWYQQKPGKAPKLLIYTASTLHSGVPSRFSGSGSGTDFTLTISNLQPEDFATYYCQQSYATLRTFGQGTKVEIK

SEQ ID NO: 433 - protein, 110 aa, Artificial Sequence
  Made in a lab
QSVLTQPASVSGSPGQSITISCSGSSSDVGHYDYVSWYQQHPGKAPKLMIYDVSNRPSGVSNRFSGSKSGNTASLTISGLQADDEAEYYCSSYTSSGTRVFGTGTKVTVL

SEQ ID NO: 434 - protein, 108 aa, Artificial Sequence
  Made in a lab
QDIQMTQSPSTLSASVGDRVTFTCRASQSVNNWVAWYQQKPGKAPKLLIYAASSLQSGVPSRFSGSGSGTDFTLTISSLQPEDFATYYCQQSYSMPLTFGGGTKVEIK

SEQ ID NO: 435 - protein, 118 aa, Artificial Sequence
  Made in a lab
EVQLLESGGGLVQPGGSLRLSCAASGFTFSKYSMHWVRQAPGKGLEWVSSIWPSGGWTTYADSVKGRFTISRDNSKNTLYLQMNSLRAEDTAVYYCARGGYYYALDYWGQGNLVTVSS

SEQ ID NO: 436 - protein, 122 aa, Artificial Sequence
  Made in a lab
EVQLLESGGGLVQPGGSLRLSCAASGFTFSFYQMHWVRQAPGKGLEWVSGIYPSGGYTKYADSVKGRFTISRDNSKNTLYLQMNSLRAEDTAVYYCARDLGYGSSWYYFDYWGQGTLVTVSS

SEQ ID NO: 437 - protein, 117 aa, Artificial Sequence
  Made in a lab
EVQLLESGGGLVQPGGSLRLSCAASGFTFSKYSMHWVRQAPGKGLEWVSGISPSGYTRYADSVKGRFTISRDNSKNTLYLQMNSLRAEDTAVYYCARDQLLEAFDIWGQGTTVTVSS

SEQ ID NO: 438 - protein, 119 aa, Artificial Sequence
  Made in a lab
EVQLLESGGGLVQPGGSLRLSCAASGFTFSEYPMNWVRQAPGKGLEWVSGIYSSGGLTKYADSVKGRFTISRDNSKNTLYLQMNSLRAEDTAVYYCARDHYGDYAFDYWGQGTLVTVSS

SEQ ID NO: 439 - protein, 126 aa, Artificial Sequence
  Made in a lab
EVQLLESGGGLVQPGGSLRLSCAASGFTFSLYEMVWVRQAPGKGLEWVSGIWPSGGWTQYADSVKGRFTISRDNSKNTLYLQMNSLRAEDTAVYYCARDLAVAGWDYYYYYGMDVWGQGTTVTVSS

SEQ ID NO: 440 - protein, 125 aa, Artificial Sequence
  Made in a lab
EVQLLESGGGLVQPGGSLRLSCAASGFTFSQYNMIWVRQAPGKGLEWVSWISSSGGTEYADSVKGRFTISRDNSKNTLYLQMNSLRAEDTAVYYCAKDRGYGSGSYGAYDAFDIWGQGKMVTVSS

SEQ ID NO: 441 - protein, 118 aa, Artificial Sequence
  Made in a lab
EVQLLESGGGLVQPGGSLRLSCAASGFTFSHYSMGWVRQAPGKGLEWVSSIYPSGGSTLYADSVKGRFTISRDNSKNTLYLQMNSLRAEDTAVYYCARWGVGATFDYWGQGTLVTVSS

SEQ ID NO: 442 - protein, 118 aa, Artificial Sequence
  Made in a lab
EVQLLESGGGLVQPGGSLRLSCAASGFTFSHYMMAWVRQAPGKGLEWVSYIYPSGGWTSYADSVKGRFTISRDNSKNTLYLQMNSLRAEDTAVYYCARFDYTIGFDFWGQGTLVTVSS

SEQ ID NO: 443 - protein, 120 aa, Artificial Sequence
  Made in a lab
EVQLLESGGGLVQPGGSLRLSCAASGFTFSHYGMTWVRQAPGKGLEWVSGIRSSGGVTNYADSVKGRFTISRDNSKNTLYLQMNSLRAEDTAVYYCAREGSGWSKAFDIWGQGTMVTVSS

SEQ ID NO: 444 - protein, 127 aa, Artificial Sequence
  Made in a lab
EVQLLESGGGLVQPGGSLRLSCAASGFTFSHYNMRWVRQAPGKGLEWVSSISPSGGFTGYADSVKGRFTISRDNSKNTLYLQMNSLRAEDTAVYYCARGINYYDSSGYYPPVGMDVWGQGTTVTVSS

SEQ ID NO: 445 - protein, 123 aa, Artificial Sequence
  Made in a lab
EVQLLESGGGLVQPGGSLRLSCAASGFTFSWYNMLWVRQAPGKGLEWVSSISPSGGYTVYADSVKGRFTISRDNSKNTLYLQMNSLRAEDTAVYYCARDRGGSPFRPDAFDIWGQGTMVTVSS

SEQ ID NO: 446 - protein, 125 aa, Artificial Sequence
  Made in a lab
EVQLLESGGGLVQPGGSLRLSCAASGFTFSEYDMLWVRQAPGKGLEWVSSIWPSGGFTQYADSVKGRFTISRDNSKNTLYLQMNSLRAEDTAVYYCARNYYDFWSGPYYYGMDVWGQGTTVTVSS

SEQ ID NO: 447 - protein, 122 aa, Artificial Sequence
  Made in a lab
EVQLLESGGGLVQPGGSLRLSCAASGFTFSGYVMGWVRQAPGKGLEWVSSISPSGGYTLYADSVKGRFTISRDNSKNTLYLQMNSLRAEDTAVYYCARAFSTRWYWGAFDIWGQGTMVTVSS

SEQ ID NO: 448 - protein, 125 aa, Artificial Sequence
  Made in a lab
EVQLLESGGGLVQPGGSLRLSCAASGFTFSIYHMNWVRQAPGKGLEWVSGISSSGGRTNYADSVKGRFTISRDNSKNTLYLQMNSLRAEDTAVYYCASSYRAAGWVDYYYGMDVWGQGTTVTVSS

SEQ ID NO: 449 - protein, 121 aa, Artificial Sequence
  Made in a lab
EVQLLESGGGLVQPGGSLRLSCAASGFTFSLYDMHWVRQAPGKGLEWVSRIYSSGGTTQYADSVKGRFTISRDNSKNTLYLQMNSLRAEDTAMYYCARDPGYGSHHSFDYWGQGTLVTVSS

SEQ ID NO: 450 - protein, 117 aa, Artificial Sequence
  Made in a lab
EVQLLESGGGLVQPGGSLRLSCAASGFTFSSYYMTWVRQAPGKGLEWVSGIYSSGGPTQYADSVKGRFTISRDNSKNTLYLQMNSLRAEDTAVYYCARAGGDAFDIWGQGTMVTVSS

SEQ ID NO: 451 - protein, 118 aa, Artificial Sequence
  Made in a lab
EVQLLESGGGLVQPGGSLRLSCAASGFTFSSYEMFWVRQAPGKGLEWVSSISPSGGYTYYADSVKGRFTISRDNSKNTLYLQMNSLRAEDTAVYYCATMTTSGFHLIWGQGTMVTVSS

SEQ ID NO: 452 - protein, 117 aa, Artificial Sequence
  Made in a lab
EVQLLESGGGLVQPGGSLRLSCAASGFTFSDYPMQWVRQAPGKGLEWVSWIGPSGGWTVYADSVKGRFTISRDNSKNTLYLQMNSLRAEDTAVYYCARDDGIAGFLWGQGTLVTVSS

SEQ ID NO: 453 - protein, 125 aa, Artificial Sequence
  Made in a lab
EVQLLESGGGLVQPGGSLRLSCAASGFTFSWYLMHWVRQAPGKGLEWVSGIWPSGGHTLYADSVKGRFTISRDNSKNTLYLQMNSLRAEDTAVYYCAREPLLWFGELSYNWFDPWGQGTLVTVSS

SEQ ID NO: 454 - protein, 123 aa, Artificial Sequence
  Made in a lab
EVQLLESGGGLVQPGGSLRLSCAASGFTFSYYENMAWVRQAPGKGLEWVSGIYPSGGLTYYADSVKGRFTISRDNSKNTLYLQMNSLRAEDTAVYYCARSRRYYDSSDAFDIWGQGTMVTVSS

SEQ ID NO: 455 - protein, 123 aa, Artificial Sequence
  Made in a lab
EVQLLESGGGLVQPGGSLRLSCAASGFTFSTYVMYWVRQAPGKGLEWVSGIGPSGGNTFYADSVKGRFTISRDNSKNTLYLQMNSLRAEDTAVYYCARDPGDFWSGYYGMDVWGQGTTVTVSS

SEQ ID NO: 456 - protein, 122 aa, Artificial Sequence
  Made in a lab
EVQLLESGGGLVQPGGSLRLSCAASGFTFSFYGMAWVRQAPGKGLEWVSSIYPSGGYTDYADSVKGRFTISRDNSKNTLYLQMNSLRAEDTAVYYCARSAGGWIGGGAFDIWGQGTMVTVSS

SEQ ID NO: 457 - protein, 126 aa, Artificial Sequence
  Made in a lab
EVQLLESGGGLVQPGGSLRLSCAASGFTFSKYPMMWVRQAPGKGLEWVSYIYPSGGKTAYADSVKGRFTISRDNSKNTLYLQMNSLRAEDTAVYYCATYGSGSYYLYYYYYYMDVWGKGTTVTVSS

SEQ ID NO: 458 - protein, 125 aa, Artificial Sequence
  Made in a lab
EVQLLESGGGLVQPGGSLRLSCAASGFTFSWYSMWWVRQAPGKGLEWVSYIVPSGGETIYADSVKGRFTISRDNSKNTLYLQMNSLRAEDTAVYYCAKNLGEGFWSDYYPPLDYWGQGTLVTVSS

SEQ ID NO: 459 - protein, 118 aa, Artificial Sequence
  Made in a lab
EVQLLESGGGLVQPGGSLRLSCAASGFTFSHYGMHWVRQAPGKGLEWVSSIYPGMTQYADSVKGRFTISRDNSKNTLYLQMNSLRAEDTAVYYCARDRGSGIDAFDIWGQGTMVTVSS

SEQ ID NO: 460 - protein, 125 aa, Artificial Sequence
  Made in a lab
EVQLLESGGGLVQPGGSLRLSCAASGFTFSWYDMLWVRQAPGKGLEWVSVISPSGGRTFYADSVKGRFTISRDNSKNTLYLQMNSLRAEDTAVYYCAVTRSMYSSSWYGAPPTHWGQGTLVTVSS

SEQ ID NO: 461 - protein, 120 aa, Artificial Sequence
  Made in a lab
EVQLLESGGGLVQPGGSLRLSCAASGFTFSWYKMHWVRQAPGKGLEWVSGISSSGGLTKYADSVKGRFTISRDNSKNTLYLQMNSLRAEDTAVYYCTTERRGDGGAFDIWGQGTMVTVSS

SEQ ID NO: 462 - protein, 122 aa, Artificial Sequence
  Made in a lab
EVQLLESGGGLVQPGGSLRLSCAASGFTFSEYTMYWVRQAPGKGLEWVSYISPSGGTTNYADSVKGRFTISRDNSKNTLYLQMNSLRAEDTAVYYCAKGAWGDIYYYGMDVWGQGTTVTVSS

SEQ ID NO: 463 - protein, 115 aa, Artificial Sequence
  Made in a lab
EVQLLESGGGLVQPGGSLRLSCAASGFTFSSYWMHWVRQAPGKGLEWVSSIYPSGGSTEYADSVKGRFTISRDNSKNTLYLQMNSLRAEDTAVYYCAKGIWFDPWGQGTLVTVSS

SEQ ID NO: 464 - protein, 121 aa, Artificial Sequence
  Made in a lab
EVQLLESGGGLVQPGGSLRLSCAASGFTFSRYGMMWVRQAPGKGLEWVSYISSSGGFTRYADSVKGRFTISRDNSKNTLYLQMNSLRAEDTAVYYCARVGGYSYGPHFDFWGQGTLVTVSS

SEQ ID NO: 465 - protein, 123 aa, Artificial Sequence
  Made in a lab
EVQLLESGGGLVQPGGSLRLSCAASGFTFSWYHMIWVRQAPGKGLEWVSWISPSGGFTKYADSVKGRFTISRDNSKNTLYLQMNSLRAEDTAVYYCARYDSRAAAGTNAFDIWGQGTMVTVSS

SEQ ID NO: 466 - protein, 123 aa, Artificial Sequence
  Made in a lab
EVQLLESGGGLVQPGGSLRLSCAASGFTFSPYKMVWVRQAPGKGLEWVSGISPSGGYTYYADSVKGRFTISRDNSKNTLYLQMNSLRAEDTAVYYCARGGYGWSYYYYGMDVWGQGTTVTVSS

SEQ ID NO: 467 - protein, 118 aa, Artificial Sequence
  Made in a lab
EVQLLESGGGLVQPGGSLRLSCAASGFTFSNYWMYWVRQAPGKGLEWVSVISSSGGHTFYADSVKGRFTISRDNSKNTLYLQMNSLRAEDTAVYYCARDYEGGSNDYWGQGTLVTVSS

SEQ ID NO: 468 - protein, 120 aa, Artificial Sequence
  Made in a lab
EVQLLESGGGLVQPGGSLRLSCAASGFTFSNYAMSWVRQAPGKGLEWVSSIYSSGGYTAYADSVKGRFTISRDNSKNTLYLQMNSLRAEDTAMYYCARVPHVFRGELDYWGQGTLVTVSS

SEQ ID NO: 469 - protein, 122 aa, Artificial Sequence
  Made in a lab
EVQLLESGGGLVQPGGSLRLSCAASGFTFSFYTMWWVRQAPGKGLEWVSSIYPSGGQTLYADSVKGRFTISRDNSKNTLYLQMNSLRAEDTAVYYCARPDSYGYLYYGMDVWGQGTTVTVSS

SEQ ID NO: 470 - protein, 115 aa, Artificial Sequence
  Made in a lab
EVQLLESGGGLVQPGGSLRLSCAASGFTFSWYPMEWVRQAPGKGLEWVSGIGPSGGQTTYADSVKGRFTISRDNSKNTLYLQMNSLRAEDTAVYYCARGSYSFIWGQGTMVTVSS

SEQ ID NO: 471 - protein, 125 aa, Artificial Sequence
  Made in a lab
EVQLLESGGGLVQPGGSLRLSCAASGFTFSLYKMAWVRQAPGKGLEWVSVIGSSGGRTPYADSVKGRFTISRDNSKNTLYLQMNSLRAEDTAVYYCARAPLSGWFGQAHDAFDIWGQGTMVTVSS

SEQ ID NO: 472 - protein, 122 aa, Artificial Sequence
  Made in a lab
EVQLLESGGGLVQPGGSLRLSCAASGFTFSTYEMNWVRQAPGKGLEWVSGIVPSGGVTYYADSVKGRFTISRDNSKNTLYLQMNSLRAEDTAVYYCARGPYSYGHDYGMDVWGQGTTVTVSS

SEQ ID NO: 473 - protein, 112 aa, Artificial Sequence
  Made in a lab
EVQLLESGGGLVQPGGSLRLSCAASGFTFSVYPMHWVRQAPGKGLEWVSSIYSSGGFTMYADSVKGRFTISRDNSKNTLYLQMNSLRAEDTAEGVADAFDIWGQGTMVTVSS

SEQ ID NO: 474 - protein, 120 aa, Artificial Sequence
  Made in a lab
EVQLLESGGGLVQPGGSLRLSCAASGFTFSSYTMHWVRQAPGKGLEWVSSISPSGGMTFYADSVKGRFTISRDNSKNTLYLQMNSLRAEDTAVYYCARTYDFWSGYFDYWGQGTLVTVSS

SEQ ID NO: 475 - protein, 125 aa, Artificial Sequence
  Made in a lab
EVQLLESGGGLVQPGGSLRLSCAASGFTFSTYEMGWVRQAPGKGLEWVSVIWSSGGHTWYADSVKGRFTISRDNSKNTLYLQMNSLRAEDTAVYYCARSNQGDFWSGYPFAFDIWGQGTMVTVSS

SEQ ID NO: 476 - protein, 120 aa, Artificial Sequence
  Made in a lab
EVQLLESGGGLVQPGGSLRLSCAASGFTFSNYNMYWVRQAPGKGLEWVSYISPSGGMTKYADSVKGRFTISRDNSKNTLYLQMNSLRAEDTAVYYCARRGVLGYYGMDVWGQGTTVTVSS

SEQ ID NO: 477 - protein, 123 aa, Artificial Sequence
  Made in a lab
EVQLLESGGGLVQPGGSLRLSCAASGFTFSLYSMNWVRQAPGKGLEWVSSISSSGGATLYADSVKGRFTISRDNSKNTLYLQMNSLRAEDTAVYYCARDLISSGYYPDAFDIWGQGTMVTVSS

SEQ ID NO: 478 - protein, 128 aa, Artificial Sequence
  Made in a lab
EVQLLESGGGLVQPGGSLRLSCAASGFTFSQYMMHWVRQAPGKGLEWVSSISSSGGWTSYADSVKGSFTISRDNSKNTLYLQMNSLRAEDTAVYYCARPLALGYDFWSGYQAAGFDYWGQGTLVTVSS

SEQ ID NO: 479 - protein, 119 aa, Artificial Sequence
  Made in a lab
EVQLLESGGGLVQPGGSLRLSCAASGFTFSWYSMVWVRQAPGKGLEWVSSIVPSGGLTWYADSVKGRFTISRDNSKNTLYLQMNSLRAEDTAVYYCARDVYGDYYFDNWGQGTLVTVSS

SEQ ID NO: 480 - protein, 119 aa, Artificial Sequence
  Made in a lab
EVQLLESGGGLVQPGGSLRLSCAASGFTFSYYNMTWVRQAPGKGLEWVSSISPSGGRTGYADSVKGRFTISRDNSKNTLYLQMNSLRAEDTAVYYCARVSGFYAAFDYWGQGTLVTVSS

SEQ ID NO: 481 - protein, 120 aa, Artificial Sequence
  Made in a lab
EVQLLESGGGLVQPGGSLRLSCAASGFTFSWYWMTWVRQAPGKGLEWVSSISPSGGHTSYADSVKGRFTISRDNSKNTLYLQMNSLRAEDTAVYYCAKSSGWYEDYFDYWGQGTLVTVSS

SEQ ID NO: 482 - protein, 123 aa, Artificial Sequence
  Made in a lab
EVQLLESGGGLVQPGGSLRLSCAASGFTFSPYEMAWVRQAPGKGLEWVSVIGPSGGYTEYADSVKGRFTISRDNSKNTLYLQMNSLRAEDTAVYYCARGYDFWSGYYDAFDIWGQGTMVTVSS

SEQ ID NO: 483 - protein, 119 aa, Artificial Sequence
  Made in a lab
EVQLLESGGGLVQPGGSLRLSCAASGFTFSSYFMGWVRQAPGKGLEWVSSIWPSGGNTTYADSVKGRFTISRDNSKNTLYLQMNSLRAEDTAVYYCARHVGWGRYFDYWGQGTLVTVSS

SEQ ID NO: 484 - protein, 124 aa, Artificial Sequence
  Made in a lab
EVQLLESGGGLVQPGGSLRLSCAASGFTFSAYRMIWVRQAPGKGLEWVSYISSSGGRTDYADSVKGRFTISRDNSKNTLYLQMNSLRAEDTAVYYCTTGGLRYFDWLAPSMDYWGQGTLVTVSS

SEQ ID NO: 485 - protein, 116 aa, Artificial Sequence
  Made in a lab
EVQLLESGGGLVQPGGSLRLSCAASGFTFSAYSMVWVRQAPGKGLEWVSYIYPSGGITTYADSVKGRFTISRDNSKNTLYLQMNSLRAEDTAVYYCAREGQVFDIWGQGTTVTVSS

SEQ ID NO: 486 - protein, 118 aa, Artificial Sequence
  Made in a lab
EVQLLESGGGLVQPGGSLRLSCAASGFTFSNYAMGWVRQAPGKGLEWVSRIVPSGGMTSYADSVKGRFTISRDNSKNTLYLQMNSLRAEDTAVYYCTTDDFWSGMDVWGQGTTVTVSS

SEQ ID NO: 487 - protein, 121 aa, Artificial Sequence
  Made in a lab
EVQLLESGGGLVQPGGSLRLSCAASGFTFSLYNMQWVRQAPGKGLEWVSGISLSGGKTFYADSVKGRFTISRDNSKNTLYLQMNSLRAEDTAVYYCARDYGVATLDAFDIWGQGTMVTVSS

SEQ ID NO: 488 - protein, 127 aa, Artificial Sequence
  Made in a lab
EVQLLESGGGLVQPGGSLRLSCAASGFTFSAYTMHWVRQAPGKGLEWVSSIYPSGGTTPYADSVKGRFTISRDNSKNTLYLQMNSLRAEDTATYYCARVVNIDFWSGYNMRSAFDIWGQGTMVTVSS

SEQ ID NO: 489 - protein, 122 aa, Artificial Sequence
  Made in a lab
EVQLLESGGGLVQPGGSLRLSCAASGFTFSDYLMGWVRQAPGKGLEWVSVISSSGGPTAYADSVKGRFTISRDNSKNTLYLQMNSLRAEDTAVYYCARVGLDYGILGAFDIWGQGTMVTVSS

SEQ ID NO: 490 - protein, 120 aa, Artificial Sequence
  Made in a lab
EVQLLESGGGLVQPGGSLRLSCAASGFTFSEYGMSWVRQAPGKGLEWVSSIRSSGGWTKYADSVKGRFTISRDNSKNTLYLQMNSLRAEDTAVYYCAKGLGATSGEFDYWGQGTLVTVSS

SEQ ID NO: 491 - protein, 121 aa, Artificial Sequence
  Made in a lab
EVQLLESGGGLVQPGGSLRLSCAASGFTFSKYDMWWVRQAPGKGLEWVSSIWPSGGWTSYADSVKGRFTISRDNSKNTLYLQMNSLRAEDTAVYYCAKSRGSPWYGDFDHWGQGTLVTVSS

SEQ ID NO: 492 - protein, 118 aa, Artificial Sequence
  Made in a lab
EVQLLESGGGLVQPGGSLRLSCAASGFTFSMYTMHWVRQAPGKGLEWVSWISPSGGWTKYADSVKGRFTISRDNSKNTLYLQMNSLRAEDTAVYYCAVSPWGGPFDYWGQGTLVTVSS

SEQ ID NO: 493 - protein, 123 aa, Artificial Sequence
  Made in a lab
EVQLLESGGGLVQPGGSLRLSCAASGFTFSQYFMMWVRQAPGKGLEWVSSISPSGGYTQYADSVKGRFTISRDNSKNTLYLQMNSLRAEDTAVYYCAKTGDYTRYYSYGMDVWGQGTLVTVSS

SEQ ID NO: 494 - protein, 124 aa, Artificial Sequence
  Made in a lab
EVQLLESGGGLVQPGGSLRLSCAASGFTFSGYSMAWVRQAPGKGLEWVSGIYSSGGWTWYADSVKGRFTISRDNSKNTLYLQMNSLRAEDTAVYYCTRDQSFSYDSSLDAFDIWGQGTMVTVSS

SEQ ID NO: 495 - protein, 124 aa, Artificial Sequence
  Made in a lab
EVQLLESGGGLVQPGGSLRLSCAASGFTFSLYGMHWVRQAPGKGLEWVSSIVPSGGLTRYADSVKGRFTISRDNSKNTLYLQMNSLRAEDTATYYCARLAYYDFWSGRDAFDIWGQGTMVTVSS

SEQ ID NO: 496 - protein, 118 aa, Artificial Sequence
  Made in a lab
EVQLLESGGGLVQPGGSLRLSCAASGFTFSHYGMDWVRQAPGKGLEWVSSIYSSGGYTLYADSVKGRFTISRDNSKNTLYLQMNSLRAEDTATYYCATRTWADAFDVWGQGTTVTVSS

SEQ ID NO: 497 - protein, 2 aa, Artificial Sequence
  Made in a lab
NS

SEQ ID NO: 498 - protein, 6 aa, Artificial Sequence
  Made in a lab
SCPPCP

SEQ ID NO: 499 - protein, 8 aa, Artificial Sequence
  Made in a lab
GGGGSGNS

SEQ ID NO: 500 - protein, 8 aa, Artificial Sequence
  Made in a lab
GCPPCPNS

SEQ ID NO: 501 - protein, 8 aa, Artificial Sequence
  Made in a lab
GSPPSPNS

SEQ ID NO: 502 - protein, 8 aa, Artificial Sequence
  Made in a lab
GSPPSPNS

SEQ ID NO: 503 - protein, 8 aa, Artificial Sequence
  Made in a lab
GCPPCPNS

SEQ ID NO: 504 - protein, 8 aa, Artificial Sequence
  Made in a lab
GCPPCPNS

SEQ ID NO: 505 - protein, 9 aa, Artificial Sequence
  Made in a lab
GCPPCPGNS

SEQ ID NO: 506 - protein, 9 aa, Artificial Sequence
  Made in a lab
GCPPCPANS

SEQ ID NO: 507 - protein, 9 aa, Artificial Sequence
  Made in a lab
GCPPCPANS

SEQ ID NO: 508 - protein, 9 aa, Artificial Sequence
  Made in a lab
EEEEDEGNS

SEQ ID NO: 509 - protein, 10 aa, Artificial Sequence
  Made in a lab
NYGGGGSGNS

SEQ ID NO: 510 - protein, 10 aa, Artificial Sequence
  Made in a lab
VSERPFPPNS

SEQ ID NO: 511 - protein, 11 aa, Artificial Sequence
  Made in a lab
EPKSCDKTCCP

SEQ ID NO: 512 - protein, 11 aa, Artificial Sequence
  Made in a lab
SQPEIVPISNS

SEQ ID NO: 513 - protein, 12 aa, Artificial Sequence
  Made in a lab
GGGGSCPPCPNS

SEQ ID NO: 514 - protein, 12 aa, Artificial Sequence
  Made in a lab
KADFLTPSIGNS

SEQ ID NO: 515 - protein, 12 aa, Artificial Sequence
  Made in a lab
QMNSELSVLANS

SEQ ID NO: 516 - protein, 13 aa, Artificial Sequence
  Made in a lab
EPKSCDKTHTCCP

SEQ ID NO: 517 - protein, 13 aa, Artificial Sequence
  Made in a lab
EPKSCDKTCPPCP

SEQ ID NO: 518 - protein, 13 aa, Artificial Sequence
  Made in a lab
GGGGSGGGGSGNS

SEQ ID NO: 519 - protein, 13 aa, Artificial Sequence
  Made in a lab
GCPPCPGGGGSNS

SEQ ID NO: 520 - protein, 13 aa, Artificial Sequence
  Made in a lab
GGGGSCPPCPGNS

SEQ ID NO: 521 - protein, 13 aa, Artificial Sequence
  Made in a lab
GCPPCPGGGGSNS

SEQ ID NO: 522 - protein, 13 aa, Artificial Sequence
  Made in a lab
GGGASCPPCPGNS

SEQ ID NO: 523 - protein, 13 aa, Artificial Sequence
  Made in a lab
GGGASCPPCAGNS

SEQ ID NO: 524 - protein, 13 aa, Artificial Sequence
  Made in a lab
GGGASCPPCAGNS

SEQ ID NO: 525 - protein, 15 aa, Artificial Sequence
  Made in a lab
NYGGGGSGGGGSGNS

SEQ ID NO: 526 - protein, 15 aa, Artificial Sequence
  Made in a lab
LSVKADFLTPSIGNS

SEQ ID NO: 527 - protein, 15 aa, Artificial Sequence
  Made in a lab
LSVLANFSQPEIGNS

SEQ ID NO: 528 - protein, 15 aa, Artificial Sequence
  Made in a lab
LKIQERVSKPKISNS

SEQ ID NO: 529 - protein, 15 aa, Artificial Sequence
  Made in a lab
LDVSERPFPPHIQNS

SEQ ID NO: 530 - protein, 15 aa, Artificial Sequence
  Made in a lab
REQLAEVTLSLKANS

SEQ ID NO: 531 - protein, 15 aa, Artificial Sequence
  Made in a lab
RIHQMNSELSVLANS

SEQ ID NO: 532 - protein, 15 aa, Artificial Sequence
  Made in a lab
DTKGKNVLEKIFSNS

SEQ ID NO: 533 - protein, 15 aa, Artificial Sequence
  Made in a lab
LPPETQESQEVTLNS

SEQ ID NO: 534 - protein, 15 aa, Artificial Sequence
  Made in a lab
RIHLNVSERPFPPNS

SEQ ID NO: 535 - protein, 15 aa, Artificial Sequence
  Made in a lab
LSVKADFLTPSIGNS

SEQ ID NO: 536 - protein, 15 aa, Artificial Sequence
  Made in a lab
LSVLANFSQPEIGNS

SEQ ID NO: 537 - protein, 15 aa, Artificial Sequence
  Made in a lab
LSVLANFSQPEIGNS

SEQ ID NO: 538 - protein, 15 aa, Artificial Sequence
  Made in a lab
RIHQMNSELSVLANS

SEQ ID NO: 539 - protein, 15 aa, Artificial Sequence
  Made in a lab
KPFFTCGSADTCPNS

SEQ ID NO: 540 - protein, 15 aa, Artificial Sequence
  Made in a lab
KPFFTCGSADTCPNS

SEQ ID NO: 541 - protein, 15 aa, Artificial Sequence
  Made in a lab
QYNCPGQYTFSMPNS

SEQ ID NO: 542 - protein, 15 aa, Artificial Sequence
  Made in a lab
GGGGSGGGGSGGGGS

SEQ ID NO: 543 - protein, 15 aa, Artificial Sequence
  Made in a lab
EPKSSDKTHTCPPCP

SEQ ID NO: 544 - protein, 15 aa, Artificial Sequence
  Made in a lab
EPKSSDKTHTCPPCS

SEQ ID NO: 545 - protein, 15 aa, Artificial Sequence
  Made in a lab
EPKSCDKTHTSPPCS

SEQ ID NO: 546 - protein, 15 aa, Artificial Sequence
  Made in a lab
EPKSCDKTHTCPPCP

SEQ ID NO: 547 - protein, 15 aa, Artificial Sequence
  Made in a lab
EPKSCDKTHTSPPSS

SEQ ID NO: 548 - protein, 15 aa, Artificial Sequence
  Made in a lab
PRGPTIKPCPPCKCP

SEQ ID NO: 549 - protein, 15 aa, Artificial Sequence
  Made in a lab
EPKSSDKTHTSPPSS

SEQ ID NO: 550 - protein, 15 aa, Artificial Sequence
  Made in a lab
EPKSSDKTHTSPPCS

SEQ ID NO: 551 - protein, 15 aa, Artificial Sequence
  Made in a lab
EPKSSDKTHTCPPSS

SEQ ID NO: 552 - protein, 15 aa, Artificial Sequence
  Made in a lab
EPKSCDKTHTSPPCP

SEQ ID NO: 553 - protein, 15 aa, Artificial Sequence
  Made in a lab
EPKSSDKTHTSPPSP

SEQ ID NO: 554 - protein, 15 aa, Artificial Sequence
  Made in a lab
EPKSSDKTHTSPPCP

SEQ ID NO: 555 - protein, 15 aa, Artificial Sequence
  Made in a lab
EPKSCDKTHTSPPSP

SEQ ID NO: 556 - protein, 15 aa, Artificial Sequence
  Made in a lab
EPKSSDKTHTCPPSP

SEQ ID NO: 557 - protein, 15 aa, Artificial Sequence
  Made in a lab
GGGGCDKTHTCPPCP

SEQ ID NO: 558 - protein, 15 aa, Artificial Sequence
  Made in a lab
EPKSCGGGGGCPPCP

SEQ ID NO: 559 - protein, 15 aa, Artificial Sequence
  Made in a lab
EPKSCDKTHTCGGCP

SEQ ID NO: 560 - protein, 15 aa, Artificial Sequence
  Made in a lab
EPKSCDKTHTCPPCG

SEQ ID NO: 561 - protein, 15 aa, Artificial Sequence
  Made in a lab
EPKSCDKTHTCPPSP

SEQ ID NO: 562 - protein, 15 aa, Artificial Sequence
  Made in a lab
EPKSCDKCHTCPPCP

SEQ ID NO: 563 - protein, 15 aa, Artificial Sequence
  Made in a lab
EPKSCDKTCCCPPCP

SEQ ID NO: 564 - protein, 15 aa, Artificial Sequence
  Made in a lab
EPKSCPPPPPCPPCP

SEQ ID NO: 565 - protein, 15 aa, Artificial Sequence
  Made in a lab
PPPPCDKTHTCPPCP

SEQ ID NO: 566 - protein, 15 aa, Artificial Sequence
  Made in a lab
EPKSCDKTHTCWWCP

SEQ ID NO: 567 - protein, 15 aa, Artificial Sequence
  Made in a lab
EPKSCDWWHTCPPCP

SEQ ID NO: 568 - protein, 15 aa, Artificial Sequence
  Made in a lab
EPKCSDKTHTCPPCP

SEQ ID NO: 569 - protein, 15 aa, Artificial Sequence
  Made in a lab
EPKSDCKTHTCPPCP

SEQ ID NO: 570 - protein, 15 aa, Artificial Sequence
  Made in a lab
EPKSDCWWHTCPPCP

SEQ ID NO: 571 - protein, 15 aa, Artificial Sequence
  Made in a lab
EPKSCDFFHTCPPCP

SEQ ID NO: 572 - protein, 15 aa, Artificial Sequence
  Made in a lab
EPKSCDWWWTCPPCP

SEQ ID NO: 573 - protein, 15 aa, Artificial Sequence
  Made in a lab
EPKSCWWTHTCPPCP

SEQ ID NO: 574 - protein, 15 aa, Artificial Sequence
  Made in a lab
EPWWCDKTHTCPPCP

SEQ ID NO: 575 - protein, 16 aa, Artificial Sequence
  Made in a lab
SQPEIVPISCPPCPNS

SEQ ID NO: 576 - protein, 17 aa, Artificial Sequence
  Made in a lab
TGEPKSSDKTHTCPPCP

SEQ ID NO: 577 - protein, 17 aa, Artificial Sequence
  Made in a lab
EPKSTDKTHTCPPCPNS

SEQ ID NO: 578 - protein, 17 aa, Artificial Sequence
  Made in a lab
EPKSTDKTHTSPPSPNS

SEQ ID NO: 579 - protein, 17 aa, Artificial Sequence
  Made in a lab
EPKSTDKTHTCPPCPNS

SEQ ID NO: 580 - protein, 17 aa, Artificial Sequence
  Made in a lab
EPKSSDKTHTCPPCPNS

SEQ ID NO: 581 - protein, 18 aa, Artificial Sequence
  Made in a lab
EPKSCDKTHTCPGGGPCP

SEQ ID NO: 582 - protein, 18 aa, Artificial Sequence
  Made in a lab
EPKSCDGGGKTHTCPPCP

SEQ ID NO: 583 - protein, 18 aa, Artificial Sequence
  Made in a lab
EPKSCDPPPKTHTCPPCP

SEQ ID NO: 584 - protein, 18 aa, Artificial Sequence
  Made in a lab
EPKSCDKTHTCPPPPPCP

SEQ ID NO: 585 - protein, 18 aa, Artificial Sequence
  Made in a lab
GGGGSGGGGSGGGGSGNS

SEQ ID NO: 586 - protein, 19 aa, Artificial Sequence
  Made in a lab
NYGGGGSGGGGSGGGGSNS

SEQ ID NO: 587 - protein, 19 aa, Artificial Sequence
  Made in a lab
LSVKADFLTPSISPPCPNS

SEQ ID NO: 588 - protein, 19 aa, Artificial Sequence
  Made in a lab
SVLANFSQPEISCPPCPNS

SEQ ID NO: 589 - protein, 20 aa, Artificial Sequence
  Made in a lab
GQRHNNSSLNTRTQKARHSP

SEQ ID NO: 590 - protein, 20 aa, Artificial Sequence
  Made in a lab
LSVLANFSQPEISCPPCPNS

SEQ ID NO: 591 - protein, 20 aa, Artificial Sequence
  Made in a lab
LKIQERVSKPKISCPPCPNS

SEQ ID NO: 592 - protein, 20 aa, Artificial Sequence
  Made in a lab
REQLAEVTLSLKACPPCPNS

SEQ ID NO: 593 - protein, 20 aa, Artificial Sequence
  Made in a lab
RIHQMNSELSVLACPPCPNS

SEQ ID NO: 594 - protein, 20 aa, Artificial Sequence
  Made in a lab
RIHLNVSERPFPPCPPCPNS

SEQ ID NO: 595 - protein, 20 aa, Artificial Sequence
  Made in a lab
NSLFNQEVQIPLTESYCPNS

SEQ ID NO: 596 - protein, 20 aa, Artificial Sequence
  Made in a lab
EEEEDEEDEEDEEEEEDGNS

SEQ ID NO: 597 - protein, 21 aa, Artificial Sequence
  Made in a lab
LDVSERPFPPHIQSCPPCPNS

SEQ ID NO: 598 - protein, 21 aa, Artificial Sequence
  Made in a lab
DTKGKNVLEKIFDSCPPCPNS

SEQ ID NO: 599 - protein, 21 aa, Artificial Sequence
  Made in a lab
LPPETQESQEVTLSCPPCPNS

SEQ ID NO: 600 - protein, 21 aa, Artificial Sequence
  Made in a lab
EPAFTPGPNIELQKDSDCPNS

SEQ ID NO: 601 - protein, 21 aa, Artificial Sequence
  Made in a lab
QRHNNSSLNTRTQKARHCPNS

SEQ ID NO: 602 - protein, 21 aa, Artificial Sequence
  Made in a lab
QRHNNSSLNTRTQKARHSPNS

SEQ ID NO: 603 - protein, 36 aa, Artificial Sequence
  Made in a lab
NYGGGGSGGGGSGGGGSNYGGGGSGGGGSGGGGSNS

SEQ ID NO: 604 - protein, 122 aa, Artificial Sequence
  Made in a lab
RTRYLQVSQQLQQTNRVLEVTNSSLRQQLRLKITQLGQSAEDLQGSRRELAQSQEALQVEQRAHQAAEGQLQACQADRQKTKETLQSEEQQRRALEQKLSNMENRLKPFFTCGSADTCCPNS

SEQ ID NO: 605 - DNA, 1971 bp, Artificial Sequence
  Made in a lab
aagcttgccgccatggattttcaagtgcagattttcagcttcctgctaatcagtgcttcagtcataattgccagaggagtcgaccccgaggagccccagctctcctgcttccggaagagccccctcagcaatgttgtttgtgagtggggtcctcggagcaccccatccctgacgacaaaggctgtgctcttggtgaggaagtttcagaacagtccggccgaagacttccaggagccgtgccagtattcccaggagtcccagaagttctcctgccagttagcagtcccggagggagacagctctttctacatagtgtccatgtgcgtcgccagtagtgtcgggagcaagttcagcaaaactcaaacctttcagggttgtggaatcttgcagcctgatccgcctgccaacatcacagtcactgccgtggccagaaacccccgctggctcagtgtcacctggcaagacccccactcctggaactcatctttctacagactacggtttgagctcagatatcgggctgaacggtcaaagacattcacaacatggatggtcaaggacctccagcatcactgtgtcatccacgacgcctggagcggcctgaggcacgtggtgcagcttcgtgcccaggaggagttcgggcaaggcgagtggagcgagtggagcccggaggccatgggcacgccttggacagaatccaggagtcctccagctggaggcggatctgatgtagccgccccacacagacagccactcacctcttcagaacgaattgacaaacaaattcggtacatcctcgacggcatctcagccctgagaaaggagacatgtaacaagagtaacatgtgtgaaagcagcaaagaggcactggcagaaaacaacctgaaccttccaaagatggctgaaaaagatggatgcttccaatctggattcaatgaggagacttgcctggtgaaaatcatcactggtcttttggagtttgaggtatacctagagtacctccagaacagatttgagagtagtgaggaacaagccagagctgtgcagatgagtacaaaagtcctgatccagttcctgcagaaaaaggcaaagaatctagatgcaataaccacccctgacccaaccacaaatgccagcctgctgacgaagctgcaggcacagaaccagtggctgcaggacatgacaactcatctcattctgcgcagctttaaggagttcctgcagtccagcctgagggctcttcggcaaatggatcagcccagagggcccacaatcaagccctgtcctccatgcaaatgcccggctccaaatcttcttggtggttcatccgtcttcatcttccctccaaagatcaaggatgtactcatgatctccctgagccccatagtcacatgtgtggtggtggatgtgagcgaggacgacccagatgtccagatcagctggtttgtgaacaacgtggaagtacacacagctcagacacaaacccatagagaggattacaacagtactctccgggtggtcagtgccctccccatccagcaccaggactggatgagtggcaaggagttcaaatgcaaggtcaacaacaaagacctcccagcgcccatcgagagaaccatctcaaaacccaaagggtcagtaagagctccacaggtatatgtcttgcctccaccagaagaagagatgactaagaaacaggtcactctgacctgcatggtcacagacttcatgcctgaagacatttacgtggagtggactaacaacgggaaaacagagctaaactacaagaacactgaaccagtcctggactctgatggttcttacttcatgtacagcaagctgagagtggaaaagaagaactgggtggaaagaaatagctactcctgttcagtggtccacgagggtctgcacaatcaccacacgactaagagcttctcccggactccgggtaaatgattctagagcggccgc

SEQ ID NO: 606 - protein, 647 aa, Artificial Sequence
  Made in a lab
MDFQVQIFSFLLISASVIIARGVDPEEPQLSCFRKSPLSNVVCEWGPRSTPSLTTKAVLLVRKFQNSPAEDFQEPCQYSQESQKFSCQLAVPEGDSSFYIVSMCVASSVGSKFSKTQTFQGCGILQPDPPANITVTAVARNPRWLSVTWQDPHSWNSSFYRLRFELRYRAERSKTFTTWMVKDLQHHCVIHDAWSGLRHVVQLRAQEEFGQGEWSEWSPEAMGTPWTESRSPPAGGGSDVAAPHRQPLTSSERIDKQIRYILDGISALRKETCNKSNMCESSKEALAENNLNLPKMAEKDGCFQSGFNEETCLVKIITGLLEFEVYLEYLQNRFESSEEQARAVQMSTKVLIQFLQKKAKNLDAITTPDPTTNASLLTKLQAQNQWLQDMTTHLILRSFKEFLQSSLRALRQMDQPRGPTIKPCPPCKCPAPNLLGGSSVFIFPPKIKDVLMISLSPIVTCVVVDVSEDDPDVQISWFVNNVEVHTAQTQTHREDYNSTLRVVSALPIQHQDWMSGKEFKCKVNNKDLPAPIERTISKPKGSVRAPQVYVLPPPEEEMTKKQVTLTCMVTDFMPEDIYVEWTNNGKTELNYKNTEPVLDSDGSYFMYSKLRVEKKNWVERNSYSCSVVHEGLHNHHTTKSFSRTPGK

SEQ ID NO: 607 - protein, 749 aa, Artificial Sequence
  Made in a lab
MDFQVQIFSFLLISASVIMSRGLPAQVAFTPYAPEPGSTCRLREYYDQTAQMCCSKCSPGQHAKVFCTKTSDTVCDSCEDSTYTQLWNWVPECLSCGSRCSSDQVETQACTREQNRICTCRPGWYCALSKQEGCRLCAPLRKCRPGFGVARPGTETSDVVCKPCAPGTFSNTTSSTDICRPHQICNVVAIPGNASMDAVCTSTSPTRSMAPGAVHLPQPVSTRSQHTQPTPEPSTAPSTSFLLPMGPSPPAEGSTGDTGEPKSSDKTHTCPPCPAPEAAGAPSVFLFPPKPKDTLMISRTPEVTCVVVDVSHEDPEVKFNWYVDGVEVHNAKTKPREEQYNSTYRVVSVLTVLHQDWLNGKAYACAVSNKALPAPIEKTISKAKGQPREPQVYTLPPSRDELTKNQVSLTCLVKGFYPSDIAVEWESNGQPENNYKTTPPVLDSDGSFFLYSKLTVDKSRWQQGNVFSCSVMHEALHNHYTQKSLSLSPGQRHNNSSLNTRTQKARHSPNSEVQLLESGGGLVQPGGSLRLSCAASGFTFSKYSMHWVRQAPGKGLEWVSSIWPSGGWTTYADSVKGRFTISRDNSKNTLYLQMNSLRAEDTAVYYCARGGYYYALDYWGQGTLVTVSSGGGGSGGGGSGGGGSQSELTQPPSVSVSPGQTATITCSGEKLGDIYASWYQQKPGQSPVLVIYQDTKRPSGIPVRFSGSNSGNTATLTISGTQAMDEADYYCQAWDSSTVFGGGTKLTVL

SEQ ID NO: 608 - protein, 758 aa, Artificial Sequence [sequence omitted]

SEQ ID NO: 609 - protein, 751 aa, Artificial Sequence
  Made in a lab
MDFQVQIFSFLLISASVIMSRGLPAQVAFTPYAPEPGSTCRLREYYDQTAQMCCSKCSPGQHAKVFCTKTSDTVCDSCEDSTYTQLWNWVPECLSCGSRCSSDQVETQACTREQNRICTCRPGWYCALSKQEGCRLCAPLRKCRPGFGVARPGTETSDVVCKPCAPGTFSNTTSSTDICRPHQICNVVAIPGNASMDAVCTSTSPTRSMAPGAVHLPQPVSTRSQHTQPTPEPSTAPSTSFLLPMGPSPPAEGSTGDTGEPKSSDKTHTCPPCPAPEAAGAPSVFLFPPKPKDTLMISRTPEVTCVVVDVSHEDPEVKFNWYVDGVEVHNAKTKPREEQYNSTYRVVSVLTVLHQDWLNGKAYACAVSNKALPAPIEKTISKAKGQPREPQVYTLPPSRDELTKNQVSLTCLVKGFYPSDIAVEWESNGQPENNYKTTPPVLDSDGSFFLYSKLTVDKSRWQQGNVFSCSVMHEALHNHYTQKSLSLSPGQRHNNSSLNTRTQKARHSPNSEVQLLESGGGLVQPGGSLRLSCAASGFTFSKYSMHWVRQAPGKGLEWVSGISPSGYTRYADSVKGRFTISRDNSKNTLYLQMNSLRAEDTAVYYCARDQLLEAFDIWGQGTTVTVSSGGGGSGGGGSGGGGSQDIQMTQSPLSLSASVGDRVTITCRASQSISSYLNWYQQKPGEAPKLLIYAASALQSGVPSRFSGSGLGTVFTLTITSLQPEDSATYYCQQSYSPPVTFGGGTKVEIK

SEQ ID NO: 610 - protein, 752 aa, Artificial Sequence
  Made in a lab
MDFQVQIFSFLLISASVIMSRGLPAQVAFTPYAPEPGSTCRLREYYDQTAQMCCSKCSPGQHAKVFCTKTSDTVCDSCEDSTYTQLWNWVPECLSCGSRCSSDQVETQACTREQNRICTCRPGWYCALSKQEGCRLCAPLRKCRPGFGVARPGTETSDVVCKPCAPGTFSNTTSSTDICRPHQICNVVAIPGNASMDAVCTSTSPTRSMAPGAVHLPQPVSTRSQHTQPTPEPSTAPSTSFLLPMGPSPPAEGSTGDTGEPKSSDKTHTCPPCPAPEAAGAPSVFLFPPKPKDTLMISRTPEVTCVVVDVSHEDPEVKFNWYVDGVEVHNAKTKPREEQYNSTYRVVSVLTVLHQDWLNGKAYACAVSNKALPAPIEKTISKAKGQPREPQVYTLPPSRDELTKNQVSLTCLVKGFYPSDIAVEWESNGQPENNYKTTPPVLDSDGSFFLYSKLTVDKSRWQQGNVFSCSVMHEALHNHYTQKSLSLSPGQRHNNSSLNTRTQKARHSPNSEVQLLESGGGLVQPGGSLRLSCAASGFTFSEYPMNWVRQAPGKGLEWVSGIYSSGGLTKYADSVKGRFTISRDNSKNTLYLQMNSLRAEDTAVYYCARDHYGDYAFDYWGQGTLVTVSSGGGGSGGGGSGGGGSQDIQMTQSPSTLSASVGDRVTITCRASQSISSWLAWYQQKPGKAPKLLIYKASSLESGVPSRFSGSGSGTEFTLTISSLQPDDFATYYCQQYNSYWTFGQGTKVEIK

SEQ ID NO: 611 - protein, 761 aa, Artificial Sequence [sequence omitted]

SEQ ID NO: 612 - protein, 759 aa, Artificial Sequence
  Made in a lab
MDFQVQIFSFLLISASVIMSRGLPAQVAFTPYAPEPGSTCRLREYYDQTAQMCCSKCSPGQHAKVFCTKTSDTVCDSCEDSTYTQLWNWVPECLSCGSRCSSDQVETQACTREQNRICTCRPGWYCALSKQEGCRLCAPLRKCRPGFGVARPGTETSDVVCKPCAPGTFSNTTSSTDICRPHQICNVVAIPGNASMDAVCTSTSPTRSMAPGAVHLPQPVSTRSQHTQPTPEPSTAPSTSFLLPMGPSPPAEGSTGDTGEPKSSDKTHTCPPCPAPEAAGAPSVFLFPPKPKDTLMISRTPEVTCVVVDVSHEDPEVKFNWYVDGVEVHNAKTKPREEQYNSTYRVVSVLTVLHQDWLNGKAYACAVSNKALPAPIEKTISKAKGQPREPQVYTLPPSRDELTKNQVSLTCLVKGFYPSDIAVEWESNGQPENNYKTTPPVLDSDGSFFLYSKLTVDKSRWQQGNVFSCSVMHEALHNHYTQKSLSLSPGQRHNNSSLNTRTQKARHSPNSEVQLLESGGGLVQPGGSLRLSCAASGFTFSQYNMIWVRQAPGKGLEWVSWISSSGGTEYADSVKGRFTISRDNSKNTLYLQMNSLRAEDTAVYYCAKDRGYGSGSYGAYDAFDIWGQGTMVTVSSGGGGSGGGGSGGGGSQDIQMTQSPSSLSASVGDRVTITCQTSQSIDRYLNWYQQKAGEAPKLLIYAASSLQSGVPSRFSGSGSGTDFTLTISSLQPEDFASYYCQQSYRTPRTFGQGTKVEIK

SEQ ID NO: 613 - protein, 754 aa, Artificial Sequence
  Made in a lab
MDFQVQIFSFLLISASVIMSRGLPAQVAFTPYAPEPGSTCRLREYYDQTAQMCCSKCSPGQHAKVFCTKTSDTVCDSCEDSTYTQLWNWVPECLSCGSRCSSDQVETQACTREQNRICTCRPGWYCALSKQEGCRLCAPLRKCRPGFGVARPGTETSDVVCKPCAPGTFSNTTSSTDICRPHQICNVVAIPGNASMDAVCTSTSPTRSMAPGAVHLPQPVSTRSQHTQPTPEPSTAPSTSFLLPMGPSPPAEGSTGDTGEPKSSDKTHTCPPCPAPEAAGAPSVFLFPPKPKDTLMISRTPEVTCVVVDVSHEDPEVKFNWYVDGVEVHNAKTKPREEQYNSTYRVVSVLTVLHQDWLNGKAYACAVSNKALPAPIEKTISKAKGQPREPQVYTLPPSRDELTKNQVSLTCLVKGFYPSDIAVEWESNGQPENNYKTTPPVLDSDGSFFLYSKLTVDKSRWQQGNVFSCSVMHEALHNHYTQKSLSLSPGQRHNNSSLNTRTQKARHSPNSEVQLLESGGGLVQPGGSLRLSCAASGFTFSHYSMGWVRQAPGKGLEWVSSIYPSGGSTLYADSVKGRFTISRDNSKNTLYLQMNSLRAEDTAVYYCARWGVGATFDYWGQGTLVTVSSGGGGSGGGGSGGGGSQDIQMTQSPGTLSLSPGERATLSCRASQSVSSSYLAWYQQKPGQAPRLLIYGASSRATGIPDRFSGSGSGTDFTLTISRLEPEDFAVYYCQQYGSSPLWTFGQGTKVEIK

SEQ ID NO: 614 - protein, 752 aa, Artificial Sequence
  Made in a lab
MDFQVQIFSFLLISASVIMSRGLPAQVAFTPYAPEPGSTCRLREYYDQTAQMCCSKCSPGQHAKVFCTKTSDTVCDSCEDSTYTQLWNWVPECLSCGSRCSSDQVETQACTREQNRICTCRPGWYCALSKQEGCRLCAPLRKCRPGFGVARPGTETSDVVCKPCAPGTFSNTTSSTDICRPHQICNVVAIPGNASMDAVCTSTSPTRSMAPGAVHLPQPVSTRSQHTQPTPEPSTAPSTSFLLPMGPSPPAEGSTGDTGEPKSSDKTHTCPPCPAPEAAGAPSVFLFPPKPKDTLMISRTPEVTCVVVDVSHEDPEVKFNWYVDGVEVHNAKTKPREEQYNSTYRVVSVLTVLHQDWLNGKAYACAVSNKALPAPIEKTISKAKGQPREPQVYTLPPSRDELTKNQVSLTCLVKGFYPSDIAVEWESNGQPENNYKTTPPVLDSDGSFFLYSKLTVDKSRWQQGNVFSCSVMHEALHNHYTQKSLSLSPGQRHNNSSLNTRTQKARHSPNSEVQLLESGGGLVQPGGSLRLSCAASGFTFSHYMMAWVRQAPGKGLEWVSYIYPSGGWTSYADSVKGRFTISRDNSKNTLYLQMNSLRAEDTAVYYCARFDYTIGFDFWGQGTLVTVSSGGGGSGGGGSGGGGSQDIQMTQSPSSLSASVGDRVTITCRASQSISSYLNWYQQKPGKAPKLLIYAASSLQSGVPSRFSGSGSGTDFTLTISSLQPEDFATYYCQQSYSTPRTFGQGTKVEIK

SEQ ID NO: 615 - protein, 756 aa, Artificial Sequence
  Made in a lab
MDFQVQIFSFLLISASVIMSRGLPAQVAFTPYAPEPGSTCRLREYYDQTAQMCCSKCSPGQHAKVFCTKTSDTVCDSCEDSTYTQLWNWVPECLSCGSRCSSDQVETQACTREQNRICTCRPGWYCALSKQEGCRLCAPLRKCRPGFGVARPGTETSDVVCKPCAPGTFSNTTSSTDICRPHQICNVVAIPGNASMDAVCTSTSPTRSMAPGAVHLPQPVSTRSQHTQPTPEPSTAPSTSFLLPMGPSPPAEGSTGDTGEPKSSDKTHTCPPCPAPEAAGAPSVFLFPPKPKDTLMISRTPEVTCVVVDVSHEDPEVKFNWYVDGVEVHNAKTKPREEQYNSTYRVVSVLTVLHQDWLNGKAYACAVSNKALPAPIEKTISKAKGQPREPQVYTLPPSRDELTKNQVSLTCLVKGFYPSDIAVEWESNGQPENNYKTTPPVLDSDGSFFLYSKLTVDKSRWQQGNVFSCSVMHEALHNHYTQKSLSLSPGQRHNNSSLNTRTQKARHSPNSEVQLLESGGGLVQPGGSLRLSCAASGFTFSHYGMTWVRQAPGKGLEWVSGIRSSGGVTNYADSVKGRFTISRDNSKNTLYLQMNSLRAEDTAVYYCAREGSGWSKAFDIWGQGTMVTVSSGGGGSGGGGSGGGGSQDIQMTQSPATLSLSPGERATLSCRASQSISTSLAWYQQIPGQAPRLLMYDASKRASGIPARFSGSGSGTDLTLTISSLEPEDSAVYYCQLRINWPPEFTFGPGTKVDIK

SEQ ID NO: 616 - protein, 761 aa, Artificial Sequence
  Made in a lab
MDFQVQIFSFLLISASVIMSRGLPAQVAFTPYAPEPGSTCRLREYYDQTAQMCCSKCSPGQHAKVFCTKTSDTVCDSCEDSTYTQLWNWVPECLSCGSRCSSDQVETQACTREQNRICTCRPGWYCALSKQEGCRLCAPLRKCRPGFGVARPGTETSDVVCKPCAPGTFSNTTSSTDICRPHQICNVVAIPGNASMDAVCTSTSPTRSMAPGAVHLPQPVSTRSQHTQPTPEPSTAPSTSFLLPMGPSPPAEGSTGDTGEPKSSDKTHTCPPCPAPEAAGAPSVFLFPPKPKDTLMISRTPEVTCVVVDVSHEDPEVKFNWYVDGVEVHNAKTKPREEQYNSTYRVVSVLTVLHQDWLNGKAYACAVSNKALPAPIEKTISKAKGQPREPQVYTLPPSRDELTKNQVSLTCLVKGFYPSDIAVEWESNGQPENNYKTTPPVLDSDGSFFLYSKLTVDKSRWQQGNVFSCSVMHEALHNHYTQKSLSLSPGQRHNNSSLNTRTQKARHSPNSEVQLLESGGGLVQPGGSLRLSCAASGFTFSHYNMRWVRQAPGKGLEWVSSISPSGGFTGYADSVKGRFTISRDNSKNTLYLQMNSLRAEDTAVYYCARGINYYDSSGYYPPVGMDVWGQGTTVTVSSGGGGSGGGGSGGGGSQDIQMTQSPSSVSASVGDRVTITCRASRGVITWLNWYQQKPGRVPSPLIFGASTLQTGVPSRFSGSGSGTDFTLTINDLQPEDFATYYCQQTHSFPLTFGGGTKVEIK

SEQ ID NO: 617 - protein, 755 aa, Artificial Sequence
  Made in a lab
MDFQVQIFSFLLISASVIMSRGLPAQVAFTPYAPEPGSTCRLREYYDQTAQMCCSKCSPGQHAKVFCTKTSDTVCDSCEDSTYTQLWNWVPECLSCGSRCSSDQVETQACTREQNRICTCRPGWYCALSKQEGCRLCAPLRKCRPGFGVARPGTETSDVVCKPCAPGTFSNTTSSTDICRPHQICNVVAIPGNASMDAVCTSTSPTRSMAPGAVHLPQPVSTRSQHTQPTPEPSTAPSTSFLLPMGPSPPAEGSTGDTGEPKSSDKTHTCPPCPAPEAAGAPSVFLFPPKPKDTLMISRTPEVTCVVVDVSHEDPEVKFNWYVDGVEVHNAKTKPREEQYNSTYRVVSVLTVLHQDWLNGKAYACAVSNKALPAPIEKTISKAKGQPREPQVYTLPPSRDELTKNQVSLTCLVKGFYPSDIAVEWESNGQPENNYKTTPPVLDSDGSFFLYSKLTVDKSRWQQGNVFSCSVMHEALHNHYTQKSLSLSPGQRHNNSSLNTRTQKARHSPNSEVQLLESGGGLVQPGGSLRLSCAASGFTFSWYNMLWVRQAPGKGLEWVSSISPSGGYTVYADSVKGRFTISRDNSKNTLYLQMNSLRAEDTAVYYCARDRGGSPFRPDAFDIWGQGTMVTVSSGGGGSGGGGSGGGGSQSALTQPPSVSVSPGQTARITCSGDKLGEKYVSWYQQRSGQSPLLVISQDTKRPSGIPERFSGSNSGNTATLTISGAQAADEADYYCQTWDSDTYVFGSGSTVTVL

SEQ ID NO: 618 - protein, 759 aa, Artificial Sequence [sequence omitted]

SEQ ID NO: 619 - protein, 756 aa, Artificial Sequence
  Made in a lab
MDFQVQIFSFLLISASVIMSRGLPAQVAFTPYAPEPGSTCRLREYYDQTAQMCCSKCSPGQHAKVFCTKTSDTVCDSCEDSTYTQLWNWVPECLSCGSRCSSDQVETQACTREQNRICTCRPGWYCALSKQEGCRLCAPLRKCRPGFGVARPGTETSDVVCKPCAPGTFSNTTSSTDICRPHQICNVVAIPGNASMDAVCTSTSPTRSMAPGAVHLPQPVSTRSQHTQPTPEPSTAPSTSFLLPMGPSPPAEGSTGDTGEPKSSDKTHTCPPCPAPEAAGAPSVFLFPPKPKDTLMISRTPEVTCVVVDVSHEDPEVKFNWYVDGVEVHNAKTKPREEQYNSTYRVVSVLTVLHQDWLNGKAYACAVSNKALPAPIEKTISKAKGQPREPQVYTLPPSRDELTKNQVSLTCLVKGFYPSDIAVEWESNGQPENNYKTTPPVLDSDGSFFLYSKLTVDKSRWQQGNVFSCSVMHEALHNHYTQKSLSLSPGQRHNNSSLNTRTQKARHSPNSEVQLLESGGGLVQPGGSLRLSCAASGFTFSGYVMGWVRQAPGKGLEWVSSISPSGGYTLYADSVKGRFTISRDNSKNTLYLQMNSLRAEDTAVYYCARAFSTRWYWGAFDIWGQGTMVTVSSGGGGSGGGGSGGGGSQDIQMTQSPATLSLSPGERATLSCRASQSVRSYLAWYQQKPGQAPRLLIYDASNRATGIPARFSGSGSGTDFTLTITSLQPEDIATYYCQQYDNLPLTFGGGTKVEIK

SEQ ID NO: 620 - protein, 759 aa, Artificial Sequence [sequence omitted]

SEQ ID NO: 621 - protein, 756 aa, Artificial Sequence
  Made in a lab
MDFQVQIFSFLLISASVIMSRGLPAQVAFTPYAPEPGSTCRLREYYDQTAQMCCSKCSPGQHAKVFCTKTSDTVCDSCEDSTYTQLWNWVPECLSCGSRCSSDQVETQACTREQNRICTCRPGWYCALSKQEGCRLCAPLRKCRPGFGVARPGTETSDVVCKPCAPGTFSNTTSSTDICRPHQICNVVAIPGNASMDAVCTSTSPTRSMAPGAVHLPQPVSTRSQHTQPTPEPSTAPSTSFLLPMGPSPPAEGSTGDTGEPKSSDKTHTCPPCPAPEAAGAPSVFLFPPKPKDTLMISRTPEVTCVVVDVSHEDPEVKFNWYVDGVEVHNAKTKPREEQYNSTYRVVSVLTVLHQDWLNGKAYACAVSNKALPAPIEKTISKAKGQPREPQVYTLPPSRDELTKNQVSLTCLVKGFYPSDIAVEWESNGQPENNYKTTPPVLDSDGSFFLYSKLTVDKSRWQQGNVFSCSVMHEALHNHYTQKSLSLSPGQRHNNSSLNTRTQKARHSPNSEVQLLESGGGLVQPGGSLRLSCAASGFTFSLYDMHWVRQAPGKGLEWVSRIYSSGGTTQYADSVKGRFTISRDNSKNTLYLQMNSLRAEDTAMYYCARDPGYGSHHSFDYWGQGTLVTVSSGGGGSGGGGSGGGGSQDIQMTQSPSTLSASVGDRVTITCRASQSMSNWLAWYQQKPGKAPKLLIYDVFTLKSGVPSRFSGSRSGTEFTLTISSLQPDDFATYYCQQYSDYSGITFGPGTEVDIR

SEQ ID NO: 622 - protein, 754 aa, Artificial Sequence [sequence omitted]

SEQ ID NO: 623 - protein, 752 aa, Artificial Sequence [sequence omitted]

SEQ ID NO: 624 - protein, 751 aa, Artificial Sequence
  Made in a lab
MDFQVQIFSFLLISASVIMSRGLPAQVAFTPYAPEPGSTCRLREYYDQTAQMCCSKCSPGQHAKVFCTKTSDTVCDSCEDSTYTQLWNWVPECLSCGSRCSSDQVETQACTREQNRICTCRPGWYCALSKQEGCRLCAPLRKCRPGFGVARPGTETSDVVCKPCAPGTFSNTTSSTDICRPHQICNVVAIPGNASMDAVCTSTSPTRSMAPGAVHLPQPVSTRSQHTQPTPEPSTAPSTSFLLPMGPSPPAEGSTGDTGEPKSSDKTHTCPPCPAPEAAGAPSVFLFPPKPKDTLMISRTPEVTCVVVDVSHEDPEVKFNWYVDGVEVHNAKTKPREEQYNSTYRVVSVLTVLHQDWLNGKAYACAVSNKALPAPIEKTISKAKGQPREPQVYTLPPSRDELTKNQVSLTCLVKGFYPSDIAVEWESNGQPENNYKTTPPVLDSDGSFFLYSKLTVDKSRWQQGNVFSCSVMHEALHNHYTQKSLSLSPGQRHNNSSLNTRTQKARHSPNSEVQLLESGGGLVQPGGSLRLSCAASGFTFSDYPMQWVRQAPGKGLEWVSWIGPSGGWTVYADSVKGRFTISRDNSKNTLYLQMNSLRAEDTAVYYCARDDGIAGFLWGQGTLVTVSSGGGGSGGGGSGGGGSQDIQMTQSPLSLSASVGDRVTITCQASRDISIYLNWYQQKPGKVPKLLIFGASTLRSGVPSRFSGSGSGTDFTLTITSLQPEDVATYYCQKYNSAPYTFGPGTKVEIR

SEQ ID NO: 625 - protein, 759 aa, Artificial Sequence
  Made in a lab
MDFQVQIFSFLLISASVIMSRGLPAQVAFTPYAPEPGSTCRLREYYDQTAQMCCSKCSPGQHAKVFCTKTSDTVCDSCEDSTYTQLWNWVPECLSCGSRCSSDQVETQACTREQNRICTCRPGWYCALSKQEGCRLCAPLRKCRPGFGVARPGTETSDVVCKPCAPGTFSNTTSSTDICRPHQICNVVAIPGNASMDAVCTSTSPTRSMAPGAVHLPQPVSTRSQHTQPTPEPSTAPSTSFLLPMGPSPPAEGSTGDTGEPKSSDKTHTCPPCPAPEAAGAPSVFLFPPKPKDTLMISRTPEVTCVVVDVSHEDPEVKFNWYVDGVEVHNAKTKPREEQYNSTYRVVSVLTVLHQDWLNGKAYACAVSNKALPAPIEKTISKAKGQPREPQVYTLPPSRDELTKNQVSLTCLVKGFYPSDIAVEWESNGQPENNYKTTPPVLDSDGSFFLYSKLTVDKSRWQQGNVFSCSVMHEALHNHYTQKSLSLSPGQRHNNSSLNTRTQKARHSPNSEVQLLESGGGLVQPGGSLRLSCAASGFTFSWYLMHWVRQAPGKGLEWVSGIWPSGGHTLYADSVKGRFTISRDNSKNTLYLQMNSLRAEDTAVYYCAREPLLWFGELSYNWFDPWGQGTLVTVSSGGGGSGGGGSGGGGSQDIQMTQSPSSVSASVGDRVTITCRASQGISSWLAWYQQKPGKAPKLLIYAASSLQSGVPSRFSGSGSGTDFTLTISSLQPEDFATYYCQQANSFPLTFGGGTKVEIK

SEQ ID NO: 626 - protein, 757 aa, Artificial Sequence
  Made in a lab
MDFQVQIFSFLLISASVIMSRGLPAQVAFTPYAPEPGSTCRLREYYDQTAQMCCSKCSPGQHAKVFCTKTSDTVCDSCEDSTYTQLWNWVPECLSCGSRCSSDQVETQACTREQNRICTCRPGWYCALSKQEGCRLCAPLRKCRPGFGVARPGTETSDVVCKPCAPGTFSNTTSSTDICRPHQICNVVAIPGNASMDAVCTSTSPTRSMAPGAVHLPQPVSTRSQHTQPTPEPSTAPSTSFLLPMGPSPPAEGSTGDTGEPKSSDKTHTCPPCPAPEAAGAPSVFLFPPKPKDTLMISRTPEVTCVVVDVSHEDPEVKFNWYVDGVEVHNAKTKPREEQYNSTYRVVSVLTVLHQDWLNGKAYACAVSNKALPAPIEKTISKAKGQPREPQVYTLPPSRDELTKNQVSLTCLVKGFYPSDIAVEWESNGQPENNYKTTPPVLDSDGSFFLYSKLTVDKSRWQQGNVFSCSVMHEALHNHYTQKSLSLSPGQRHNNSSLNTRTQKARHSPNSEVQLLESGGGLVQPGGSLRLSCAASGFTFSYYENMAWVRQAPGKGLEWVSGIYPSGGLTYYADSVKGRFTISRDNSKNTLYLQMNSLRAEDTAVYYCARSRRYYDSSDAFDIWGQGTMVTVSSGGGGSGGGGSGGGGSQDIQMTQSPATLSLSPGERATLSCRASQSINTYLAWYQQKPGHPPRLLIYDASNRATGIPDRFSGSGSGTDFTLTISRLEPEDFVVYYCQQYGRSRYTFGQGTKLEIK

SEQ ID NO: 627 - protein, 757 aa, Artificial Sequence
  Made in a lab
MDFQVQIFSFLLISASVIMSRGLPAQVAFTPYAPEPGSTCRLREYYDQTAQMCCSKCSPGQHAKVFCTKTSDTVCDSCEDSTYTQLWNWVPECLSCGSRCSSDQVETQACTREQNRICTCRPGWYCALSKQEGCRLCAPLRKCRPGFGVARPGTETSDVVCKPCAPGTFSNTTSSTDICRPHQICNVVAIPGNASMDAVCTSTSPTRSMAPGAVHLPQPVSTRSQHTQPTPEPSTAPSTSFLLPMGPSPPAEGSTGDTGEPKSSDKTHTCPPCPAPEAAGAPSVFLFPPKPKDTLMISRTPEVTCVVVDVSHEDPEVKFNWYVDGVEVHNAKTKPREEQYNSTYRVVSVLTVLHQDWLNGKAYACAVSNKALPAPIEKTISKAKGQPREPQVYTLPPSRDELTKNQVSLTCLVKGFYPSDIAVEWESNGQPENNYKTTPPVLDSDGSFFLYSKLTVDKSRWQQGNVFSCSVMHEALHNHYTQKSLSLSPGQRHNNSSLNTRTQKARHSPNSEVQLLESGGGLVQPGGSLRLSCAASGFTFSTYVMYWVRQAPGKGLEWVSGIGPSGGNTFYADSVKGRFTISRDNSKNTLYLQMNSLRAEDTAVCYCARDPGDFWSGYYGMDVWGQGTTVTVSSGGGGSGGGGSGGGGSQDIQMTQSPSSLSASVGDRVTITCRASQGISNYLAWYQQKPGKVPKLLINAASTLQSGVPSRFSGSGSGTEFTLTISSLQPEDFATYYCQQSDNIPYTFGLGTKLEIK

SEQ ID NO: 628 - protein, 758 aa, Artificial Sequence
  Made in a lab
MDFQVQIFSFLLISASVIMSRGLPAQVAFTPYAPEPGSTCRLREYYDQTAQMCCSKCSPGQHAKVFCTKTSDTVCDSCEDSTYTQLWNWVPECLSCGSRCSSDQVETQACTREQNRICTCRPGWYCALSKQEGCRLCAPLRKCRPGFGVARPGTETSDVVCKPCAPGTFSNTTSSTDICRPHQICNVVAIPGNASMDAVCTSTSPTRSMAPGAVHLPQPVSTRSQHTQPTPEPSTAPSTSFLLPMGPSPPAEGSTGDTGEPKSSDKTHTCPPCPAPEAAGAPSVFLFPPKPKDTLMISRTPEVTCVVVDVSHEDPEVKFNWYVDGVEVHNAKTKPREEQYNSTYRVVSVLTVLHQDWLNGKAYACAVSNKALPAPIEKTISKAKGQPREPQVYTLPPSRDELTKNQVSLTCLVKGFYPSDIAVEWESNGQPENNYKTTPPVLDSDGSFFLYSKLTVDKSRWQQGNVFSCSVMHEALHNHYTQKSLSLSPGQRHNNSSLNTRTQKARHSPNSEVQLLESGGGLVQPGGSLRLSCAASGFTFSFYGMAWVRQAPGKGLEWVSSIYPSGGYTDYADSVKGRFTISRDNSKNTLYLQMNSLRAEDTAVYYCARSAGGWIGGGAFDIWGQGTMVTVSSGGGGSGGGGSGGGGSQSELTQPPSASGTPGQRVTISCSGSSSNIGSNTVNWYQQLPGTAPKLLIYSNNQRPSGVPDRFSGSKSGTSASLAISGLQSEDEADYYCAAWDDSLNGYVFGIGTKVTVL

SEQ ID NO: 629 - protein, 760 aa, Artificial Sequence
  Made in a lab
MDFQVQIFSFLLISASVIMSRGLPAQVAFTPYAPEPGSTCRLREYYDQTAQMCCSKCSPGQHAKVFCTKTSDTVCDSCEDSTYTQLWNWVPECLSCGSRCSSDQVETQACTREQNRICTCRPGWYCALSKQEGCRLCAPLRKCRPGFGVARPGTETSDVVCKPCAPGTFSNTTSSTDICRPHQICNVVAIPGNASMDAVCTSTSPTRSMAPGAVHLPQPVSTRSQHTQPTPEPSTAPSTSFLLPMGPSPPAEGSTGDTGEPKSSDKTHTCPPCPAPEAAGAPSVFLFPPKPKDTLMISRTPEVTCVVVDVSHEDPEVKFNWYVDGVEVHNAKTKPREEQYNSTYRVVSVLTVLHQDWLNGKAYACAVSNKALPAPIEKTISKAKGQPREPQVYTLPPSRDELTKNQVSLTCLVKGFYPSDIAVEWESNGQPENNYKTTPPVLDSDGSFFLYSKLTVDKSRWQQGNVFSCSVMHEALHNHYTQKSLSLSPGQRHNNSSLNTRTQKARHSPNSEVQLLESGGGLVQPGGSLRLSCAASGFTFSKYPMMWVRQAPGKGLEWVSYIYPSGGKTAYADSVKGRFTISRDNSKNTLYLQMNSLRAEDTAVYYCATYGSGSYYLYYYYYYMDVWGKGTTVTVSSGGGGSGGGGSGGGGSQDIQMTQSPSSLSASVGDSVTIACRASQSISTYLNWYQQKPGQAPKLLIYEATNLQSGVPSRFSGSGSGTDFTLTISSLQPEDVATYYCQQANNFPFTFGPGTKVDIK

SEQ ID NO: 630 - protein, 761 aa, Artificial Sequence
  Made in a lab
MDFQVQIFSFLLISASVIMSRGLPAQVAFTPYAPEPGSTCRLREYYDQTAQMCCSKCSPGQHAKVFCTKTSDTVCDSCEDSTYTQLWNWVPECLSCGSRCSSDQVETQACTREQNRICTCRPGWYCALSKQEGCRLCAPLRKCRPGFGVARPGTETSDVVCKPCAPGTFSNTTSSTDICRPHQICNVVAIPGNASMDAVCTSTSPTRSMAPGAVHLPQPVSTRSQHTQPTPEPSTAPSTSFLLPMGPSPPAEGSTGDTGEPKSSDKTHTCPPCPAPEAAGAPSVFLFPPKPKDTLMISRTPEVTCVVVDVSHEDPEVKFNWYVDGVEVHNAKTKPREEQYNSTYRVVSVLTVLHQDWLNGKAYACAVSNKALPAPIEKTISKAKGQPREPQVYTLPPSRDELTKNQVSLTCLVKGFYPSDIAVEWESNGQPENNYKTTPPVLDSDGSFFLYSKLTVDKSRWQQGNVFSCSVMHEALHNHYTQKSLSLSPGQRHNNSSLNTRTQKARHSPNSEVQLLESGGGLVQPGGSLRLSCAASGFTFSWYSMWWVRQAPGKGLEWVSYIVPSGGETIYADSVKGRFTISRDNSKNTLYLQMNSLRAEDTAVYYCAKNLGEGFWSDYYPPLDYWGQGTLVTVSSGGGGSGGGGSGGGGSQSVLTQPPSASGTPGQRVTISCSGSSSNIGGNAVNWYQQLPGTAPKLVLYSSNHRPSGVPDRFSGSRSGTSASLAISGLQSQDEADYYCAAWDDSLNGPLFGGGTKLTVL

SEQ ID NO: 631 - protein, 752 aa, Artificial Sequence
  Made in a lab
MDFQVQIFSFLLISASVIMSRGLPAQVAFTPYAPEPGSTCRLREYYDQTAQMCCSKCSPGQHAKVFCTKTSDTVCDSCEDSTYTQLWNWVPECLSCGSRCSSDQVETQACTREQNRICTCRPGWYCALSKQEGCRLCAPLRKCRPGFGVARPGTETSDVVCKPCAPGTFSNTTSSTDICRPHQICNVVAIPGNASMDAVCTSTSPTRSMAPGAVHLPQPVSTRSQHTQPTPEPSTAPSTSFLLPMGPSPPAEGSTGDTGEPKSSDKTHTCPPCPAPEAAGAPSVFLFPPKPKDTLMISRTPEVTCVVVDVSHEDPEVKFNWYVDGVEVHNAKTKPREEQYNSTYRVVSVLTVLHQDWLNGKAYACAVSNKALPAPIEKTISKAKGQPREPQVYTLPPSRDELTKNQVSLTCLVKGFYPSDIAVEWESNGQPENNYKTTPPVLDSDGSFFLYSKLTVDKSRWQQGNVFSCSVMHEALHNHYTQKSLSLSPGQRHNNSSLNTRTQKARHSPNSEVQLLESGGGLVQPGGSLRLSCAASGFTFSHYGMHWVRQAPGKGLEWVSSIYPGMTQYADSVKGRFTISRDNSKNTLYLQMNSLRAEDTAVYYCARDRGSGIDAFDIWGQGTMVTVSSGGGGSGGGGSGGGGSQSELTQPPSVSVSPGQTATVSCSGEKLGDRYAWWYQQKAGQSPVLVIYQDTKRPSGVPDRFSGSNSGTSASLVISGPQSEDEADYYCAAWDDSLKGVVFGGGSKLTVL

SEQ ID NO: 632 - protein, 761 aa, Artificial Sequence
  Made in a lab
MDFQVQIFSFLLISASVIMSRGLPAQVAFTPYAPEPGSTCRLREYYDQTAQMCCSKCSPGQHAKVFCTKTSDTVCDSCEDSTYTQLWNWVPECLSCGSRCSSDQVETQACTREQNRICTCRPGWYCALSKQEGCRLCAPLRKCRPGFGVARPGTETSDVVCKPCAPGTFSNTTSSTDICRPHQICNVVAIPGNASMDAVCTSTSPTRSMAPGAVHLPQPVSTRSQHTQPTPEPSTAPSTSFLLPMGPSPPAEGSTGDTGEPKSSDKTHTCPPCPAPEAAGAPSVFLFPPKPKDTLMISRTPEVTCVVVDVSHEDPEVKFNWYVDGVEVHNAKTKPREEQYNSTYRVVSVLTVLHQDWLNGKAYACAVSNKALPAPIEKTISKAKGQPREPQVYTLPPSRDELTKNQVSLTCLVKGFYPSDIAVEWESNGQPENNYKTTPPVLDSDGSFFLYSKLTVDKSRWQQGNVFSCSVMHEALHNHYTQKSLSLSPGQRHNNSSLNTRTQKARHSPNSEVQLLESGGGLVQPGGSLRLSCAASGFTFSWYDMLWVRQAPGKGLEWVSVISPSGGRTFYADSVKGRFTISRDNSKNTLYLQMNSLRAEDTAVYYCAVTRSMYSSSWYGAPPTHWGQGTLVTVSSGGGGSGGGGSGGGGSQSELTQPPSASGTPGQRVTISCSGRSSNIGSNSVNWYQQLPGTAPKLLIYSNNHRPSGVPDRFSGSKSGTSASLAISGLQSEDEADYYCAAWDDSLYQGVFGGGTKLTVL

SEQ ID NO: 633 - protein, 754 aa, Artificial Sequence
  Made in a lab
MDFQVQIFSFLLISASVIMSRGLPAQVAFTPYAPEPGSTCRLREYYDQTAQMCCSKCSPGQHAKVFCTKTSDTVCDSCEDSTYTQLWNWVPECLSCGSRCSSDQVETQACTREQNRICTCRPGWYCALSKQEGCRLCAPLRKCRPGFGVARPGTETSDVVCKPCAPGTFSNTTSSTDICRPHQICNVVAIPGNASMDAVCTSTSPTRSMAPGAVHLPQPVSTRSQHTQPTPEPSTAPSTSFLLPMGPSPPAEGSTGDTGEPKSSDKTHTCPPCPAPEAAGAPSVFLFPPKPKDTLMISRTPEVTCVVVDVSHEDPEVKFNWYVDGVEVHNAKTKPREEQYNSTYRVVSVLTVLHQDWLNGKAYACAVSNKALPAPIEKTISKAKGQPREPQVYTLPPSRDELTKNQVSLTCLVKGFYPSDIAVEWESNGQPENNYKTTPPVLDSDGSFFLYSKLTVDKSRWQQGNVFSCSVMHEALHNHYTQKSLSLSPGQRHNNSSLNTRTQKARHSPNSEVQLLESGGGLVQPGGSLRLSCAASGFTFSWYKMHWVRQAPGKGLEWVSGISSSGGLTKYADSVKGRFTISRDNSKNTLYLQMNSLRAEDTAVYYCTTERRGDGGAFDIWGQGTMVTVSSGGGGSGGGGSGGGGSQDIQMTQSPSSLSASVGDRVTITCRASQSISSYLNWYQQKPGKAPKLLIYAASSLQSGVPSKFSGSGSGTDFTLTISSLLPEDFATYYCQQYEYFPPTFGQGTKVEIK

SEQ ID NO: 634 - protein, 757 aa, Artificial Sequence [sequence omitted]

SEQ ID NO: 635 - protein, 749 aa, Artificial Sequence
  Made in a lab
MDFQVQIFSFLLISASVIMSRGLPAQVAFTPYAPEPGSTCRLREYYDQTAQMCCSKCSPGQHAKVFCTKTSDTVCDSCEDSTYTQLWNWVPECLSCGSRCSSDQVETQACTREQNRICTCRPGWYCALSKQEGCRLCAPLRKCRPGFGVARPGTETSDVVCKPCAPGTFSNTTSSTDICRPHQICNVVAIPGNASMDAVCTSTSPTRSMAPGAVHLPQPVSTRSQHTQPTPEPSTAPSTSFLLPMGPSPPAEGSTGDTGEPKSSDKTHTCPPCPAPEAAGAPSVFLFPPKPKDTLMISRTPEVTCVVVDVSHEDPEVKFNWYVDGVEVHNAKTKPREEQYNSTYRVVSVLTVLHQDWLNGKAYACAVSNKALPAPIEKTISKAKGQPREPQVYTLPPSRDELTKNQVSLTCLVKGFYPSDIAVEWESNGQPENNYKTTPPVLDSDGSFFLYSKLTVDKSRWQQGNVFSCSVMHEALHNHYTQKSLSLSPGQRHNNSSLNTRTQKARHSPNSEVQLLESGGGLVQPGGSLRLSCAASGFTFSSYWMHWVRQAPGKGLEWVSSIYPSGGSTEYADSVKGRFTISRDNSKNTLYLQMNSLRAEDTAVYYCAKGIWFDPWGQGTLVTVSSGGGGSGGGGSGGGGSQDIQMTQSPATLSASVGDRVTITCRSSQRISGYLNWYQQQPGKAPKLLIYAASTLQSGVPSRISGSGSGTDFSLIISSLQPEDVATYYCQQSYSPPFTFGQGTKVEIK

SEQ ID NO: 636 - protein, 755 aa, Artificial Sequence
  Made in a lab
MDFQVQIFSFLLISASVIMSRGLPAQVAFTPYAPEPGSTCRLREYYDQTAQMCCSKCSPGQHAKVFCTKTSDTVCDSCEDSTYTQLWNWVPECLSCGSRCSSDQVETQACTREQNRICTCRPGWYCALSKQEGCRLCAPLRKCRPGFGVARPGTETSDVVCKPCAPGTFSNTTSSTDICRPHQICNVVAIPGNASMDAVCTSTSPTRSMAPGAVHLPQPVSTRSQHTQPTPEPSTAPSTSFLLPMGPSPPAEGSTGDTGEPKSSDKTHTCPPCPAPEAAGAPSVFLFPPKPKDTLMISRTPEVTCVVVDVSHEDPEVKFNWYVDGVEVHNAKTKPREEQYNSTYRVVSVLTVLHQDWLNGKAYACAVSNKALPAPIEKTISKAKGQPREPQVYTLPPSRDELTKNQVSLTCLVKGFYPSDIAVEWESNGQPENNYKTTPPVLDSDGSFFLYSKLTVDKSRWQQGNVFSCSVMHEALHNHYTQKSLSLSPGQRHNNSSLNTRTQKARHSPNSEVQLLESGGGLVQPGGPLRLSCAASGFTFSRYGMMWVRQAPGKGLEWVSYISSSGGFTRYADSVKGRFTISRDNSKNTLYLQMNSLRAEDTAVYYCARVGGYSYGPHFDFWGQGTLVTVSSGGGGSGGGGSGGGGSQDIQMTQSPSTLSASVGDRVTITCRASQSISTWLAWFQQKPGKAPKLLIYKASSLQSGVPSRFSGSGSGTDFTLTISSLQPEDFATYYCQQYKSYPFTFGGGTKVEIK

SEQ ID NO: 637 - protein, 757 aa, Artificial Sequence
  Made in a lab
MDFQVQIFSFLLISASVIMSRGLPAQVAFTPYAPEPGSTCRLREYYDQTAQMCCSKCSPGQHAKVFCTKTSDTVCDSCEDSTYTQLWNWVPECLSCGSRCSSDQVETQACTREQNRICTCRPGWYCALSKQEGCRLCAPLRKCRPGFGVARPGTETSDVVCKPCAPGTFSNTTSSTDICRPHQICNVVAIPGNASMDAVCTSTSPTRSMAPGAVHLPQPVSTRSQHTQPTPEPSTAPSTSFLLPMGPSPPAEGSTGDTGEPKSSDKTHTCPPCPAPEAAGAPSVFLFPPKPKDTLMISRTPEVTCVVVDVSHEDPEVKFNWYVDGVEVHNAKTKPREEQYNSTYRVVSVLTVLHQDWLNGKAYACAVSNKALPAPIEKTISKAKGQPREPQVYTLPPSRDELTKNQVSLTCLVKGFYPSDIAVEWESNGQPENNYKTTPPVLDSDGSFFLYSKLTVDKSRWQQGNVFSCSVMHEALHNHYTQKSLSLSPGQRHNNSSLNTRTQKARHSPNSEVQLLESGGGLVQPGGSLRLSCAASGFTFSWYHMIWVRQAPGKGLEWVSWISPSGGFTKYADSVKGRFTISRDNSKNTLYLQMNSLRAEDTAVYYCARYDSRAAAGTNAFDIWGQGTMVTVSSGGGGSGGGGSGGGGSQDIQMTQSPSSLSASVGDSVTITCQASQDIRSYLNWFQQKPGKAPKLLIYDTVNLQTGVPSRFSGSGSGTDYSFTINNLQPEDFATYCCQQYEYLPITFGQGTRLEIK

SEQ ID NO: 638 - protein, 757 aa, Artificial Sequence [sequence omitted]

SEQ ID NO: 639 - protein, 752 aa, Artificial Sequence
  Made in a lab
MDFQVQIFSFLLISASVIMSRGLPAQVAFTPYAPEPGSTCRLREYYDQTAQMCCSKCSPGQHAKVFCTKTSDTVCDSCEDSTYTQLWNWVPECLSCGSRCSSDQVETQACTREQNRICTCRPGWYCALSKQEGCRLCAPLRKCRPGFGVARPGTETSDVVCKPCAPGTFSNTTSSTDICRPHQICNVVAIPGNASMDAVCTSTSPTRSMAPGAVHLPQPVSTRSQHTQPTPEPSTAPSTSFLLPMGPSPPAEGSTGDTGEPKSSDKTHTCPPCPAPEAAGAPSVFLFPPKPKDTLMISRTPEVTCVVVDVSHEDPEVKFNWYVDGVEVHNAKTKPREEQYNSTYRVVSVLTVLHQDWLNGKAYACAVSNKALPAPIEKTISKAKGQPREPQVYTLPPSRDELTKNQVSLTCLVKGFYPSDIAVEWESNGQPENNYKTTPPVLDSDGSFFLYSKLTVDKSRWQQGNVFSCSVMHEALHNHYTQKSLSLSPGQRHNNSSLNTRTQKARHSPNSEVQLLESGGGLVQPGGSLRLSCAASGFTFSNYWMYWVRQAPGKGLEWVSVISSSGGHTFYADSVKGRFTISRDNSKNTLYLQMNSLRAEDTAVYYCARDYEGGSNDYWGQGTLVTVSSGGGGSGGGGSGGGGSQDIQMTQSPSSLSASVGDRVTITCRASQSISSYLNWYQQKPGKAPKLLIYAASSLQSGVPSRFSGSGSGTDFTLTISSLQPEDFATYYCQQSYSTPVTFGGGTKVEIK

SEQ ID NO: 640 - protein, 755 aa, Artificial Sequence [sequence omitted]

SEQ ID NO: 641 - protein, 756 aa, Artificial Sequence
  Made in a lab
MDFQVQIFSFLLISASVIMSRGLPAQVAFTPYAPEPGSTCRLREYYDQTAQMCCSKCSPGQHAKVFCTKTSDTVCDSCEDSTYTQLWNWVPECLSCGSRCSSDQVETQACTREQNRICTCRPGWYCALSKQEGCRLCAPLRKCRPGFGVARPGTETSDVVCKPCAPGTFSNTTSSTDICRPHQICNVVAIPGNASMDAVCTSTSPTRSMAPGAVHLPQPVSTRSQHTQPTPEPSTAPSTSFLLPMGPSPPAEGSTGDTGEPKSSDKTHTCPPCPAPEAAGAPSVFLFPPKPKDTLMISRTPEVTCVVVDVSHEDPEVKFNWYVDGVEVHNAKTKPREEQYNSTYRVVSVLTVLHQDWLNGKAYACAVSNKALPAPIEKTISKAKGQPREPQVYTLPPSRDELTKNQVSLTCLVKGFYPSDIAVEWESNGQPENNYKTTPPVLDSDGSFFLYSKLTVDKSRWQQGNVFSCSVMHEALHNHYTQKSLSLSPGQRHNNSSLNTRTQKARHSPNSEVQLLESGGGLVQPGGSLRLSCAASGFTFSFYTMWWVRQAPGKGLEWVSSIYPSGGQTLYADSVKGRFTISRDNSKNTLYLQMNSLRAEDTAVYYCARPDSYGYLYYGMDVWGQGTTVTVSSGGGGSGGGGSGGGGSQDIQMTQSPSSLSASVGDRVTITCRASQSIGTYLNWYQQKPGKAPNLLIYGTSSLQRGVPSRFSGSGSGTDFTLTISTLQPEDFVHYYCQQSYTSPPTFGQGTKVEVK

SEQ ID NO: 642 - protein, 747 aa, Artificial Sequence
  Made in a lab
MDFQVQIFSFLLISASVIMSRGLPAQVAFTPYAPEPGSTCRLREYYDQTAQMCCSKCSPGQHAKVFCTKTSDTVCDSCEDSTYTQLWNWVPECLSCGSRCSSDQVETQACTREQNRICTCRPGWYCALSKQEGCRLCAPLRKCRPGFGVARPGTETSDVVCKPCAPGTFSNTTSSTDICRPHQICNVVAIPGNASMDAVCTSTSPTRSMAPGAVHLPQPVSTRSQHTQPTPEPSTAPSTSFLLPMGPSPPAEGSTGDTGEPKSSDKTHTCPPCPAPEAAGAPSVFLFPPKPKDTLMISRTPEVTCVVVDVSHEDPEVKFNWYVDGVEVHNAKTKPREEQYNSTYRVVSVLTVLHQDWLNGKAYACAVSNKALPAPIEKTISKAKGQPREPQVYTLPPSRDELTKNQVSLTCLVKGFYPSDIAVEWESNGQPENNYKTTPPVLDSDGSFFLYSKLTVDKSRWQQGNVFSCSVMHEALHNHYTQKSLSLSPGQRHNNSSLNTRTQKARHSPNSEVQLLESGGGLVQPGGSLRLSCAASGFTFSWYPMEWVRQAPGKGLEWVSGIGPSGGQTTYADSVKGRFTISRDNSKNTLYLQMNSLRAEDTAVYYCARGSYSFIWGQGTMVTVSSGGGGSGGGGSGGGGSQYELTQSPSVSVSPGQTASIPCSGDQLGGKFTSWYQQKAGQSPLLVIYQDTKRPSGIPERFSGSNSGNTATLTITGTQAMDEADYYCLVWDSNTYVFGPGTKVTVL

SEQ ID NO: 643 - protein, 759 aa, Artificial Sequence
  Made in a lab
MDFQVQIFSFLLISASVIMSRGLPAQVAFTPYAPEPGSTCRLREYYDQTAQMCCSKCSPGQHAKVFCTKTSDTVCDSCEDSTYTQLWNWVPECLSCGSRCSSDQVETQACTREQNRICTCRPGWYCALSKQEGCRLCAPLRKCRPGFGVARPGTETSDVVCKPCAPGTFSNTTSSTDICRPHQICNVVAIPGNASMDAVCTSTSPTRSMAPGAVHLPQPVSTRSQHTQPTPEPSTAPSTSFLLPMGPSPPAEGSTGDTGEPKSSDKTHTCPPCPAPEAAGAPSVFLFPPKPKDTLMISRTPEVTCVVVDVSHEDPEVKFNWYVDGVEVHNAKTKPREEQYNSTYRVVSVLTVLHQDWLNGKAYACAVSNKALPAPIEKTISKAKGQPREPQVYTLPPSRDELTKNQVSLTCLVKGFYPSDIAVEWESNGQPENNYKTTPPVLDSDGSFFLYSKLTVDKSRWQQGNVFSCSVMHEALHNHYTQKSLSLSPGQRHNNSSLNTRTQKARHSPNSEVQLLESGGGLVQPGGSLRLSCAASGFTFSLYKMAWVRQAPGKGLEWVSVIGSSGGRTPYADSVKGRFTISRDNSKNTLYLQMNSLRAEDTAVYYCARAPLSGWFGQAHDAFDIWGQGTMVTVSSGGGGSGGGGSGGGGSQYELTQSPSVSVAPGQTARITCGGNNIGSKSVHWYQQKPGQAPVLVVYDDSDRPSGIPERFSGSNSGNTATLTVSRVEAGDEADYYCQVWDSSGGLQVFGTGTKVTVL

SEQ ID NO: 644 - protein, 756 aa, Artificial Sequence [sequence omitted]

SEQ ID NO: 645 - protein, 751 aa, Artificial Sequence
  Made in a lab
MDFQVQIFSFLLISASVIMSRGLPAQVAFTPYAPEPGSTCRLREYYDQTAQMCCSKCSPGQHAKVFCTKTSDTVCDSCEDSTYTQLWNWVPECLSCGSRCSSDQVETQACTREQNRICTCRPGWYCALSKQEGCRLCAPLRKCRPGFGVARPGTETSDVVCKPCAPGTFSNTTSSTDICRPHQICNVVAIPGNASMDAVCTSTSPTRSMAPGAVHLPQPVSTRSQHTQPTPEPSTAPSTSFLLPMGPSPPAEGSTGDTGEPKSSDKTHTCPPCPAPEAAGAPSVFLFPPKPKDTLMISRTPEVTCVVVDVSHEDPEVKFNWYVDGVEVHNAKTKPREEQYNSTYRVVSVLTVLHQDWLNGKAYACAVSNKALPAPIEKTISKAKGQPREPQVYTLPPSRDELTKNQVSLTCLVKGFYPSDIAVEWESNGQPENNYKTTPPVLDSDGSFFLYSKLTVDKSRWQQGNVFSCSVMHEALHNHYTQKSLSLSPGQRHNNSSLNTRTQKARHSPNSEVQLLESGGGLVQPGGSLRLSCAASGFTFSVYPMHWVRQAPGKGLEWVSSIYSSGGFTMYADSVKGRFTISRDNSKNTLYLQMNSLRAEDTAVYYCVREGVADAFDIWGQGTMVTVSSGGGGSGGGGSGGGGSQDIQMTQSPSTLSASVGDRVTITCRASQSISSWLAWYQQKPGKAPKLLIYKASSLESGVPSRFSGSGSGTEFTLTISSLQPDDFATYHCQQYKSYWTFGQGTKVEIK

SEQ ID NO: 646 - protein, 756 aa, Artificial Sequence
  Made in a lab
MDFQVQIFSFLLISASVIMSRGLPAQVAFTPYAPEPGSTCRLREYYDQTAQMCCSKCSPGQHAKVFCTKTSDTVCDSCEDSTYTQLWNWVPECLSCGSRCSSDQVETQACTREQNRICTCRPGWYCALSKQEGCRLCAPLRKCRPGFGVARPGTETSDVVCKPCAPGTFSNTTSSTDICRPHQICNVVAIPGNASMDAVCTSTSPTRSMAPGAVHLPQPVSTRSQHTQPTPEPSTAPSTSFLLPMGPSPPAEGSTGDTGEPKSSDKTHTCPPCPAPEAAGAPSVFLFPPKPKDTLMISRTPEVTCVVVDVSHEDPEVKFNWYVDGVEVHNAKTKPREEQYNSTYRVVSVLTVLHQDWLNGKAYACAVSNKALPAPIEKTISKAKGQPREPQVYTLPPSRDELTKNQVSLTCLVKGFYPSDIAVEWESNGQPENNYKTTPPVLDSDGSFFLYSKLTVDKSRWQQGNVFSCSVMHEALHNHYTQKSLSLSPGQRHNNSSLNTRTQKARHSPNSEVQLLESGGGLVQPGGSLRLSCAASGFTFSSYTMHWVRQAPGKGLEWVSSISPSGGMTFYADSVKGRFTISRDNSKNTLYLQMNSLRAEDTAVYYCARTYDFWSGYFDYWGQGTLVTVSSGGGGSGGGGSGGGGSQSELTQPPSVSEAPRQRVTVSCSGSPSNIGSNSVNWYQQLPGKAPKVVIYYDDLVPSGVSDRFSGSKSGTSASLAISGLQSEDEADYYCAAWDDRLNGWVFGGGTKLTVL

SEQ ID NO: 647 - protein, 759 aa, Artificial Sequence [sequence omitted]

SEQ ID NO: 648 - protein, 754 aa, Artificial Sequence
  Made in a lab
MDFQVQIFSFLLISASVIMSRGLPAQVAFTPYAPEPGSTCRLREYYDQTAQMCCSKCSPGQHAKVFCTKTSDTVCDSCEDSTYTQLWNWVPECLSCGSRCSSDQVETQACTREQNRICTCRPGWYCALSKQEGCRLCAPLRKCRPGFGVARPGTETSDVVCKPCAPGTFSNTTSSTDICRPHQICNVVAIPGNASMDAVCTSTSPTRSMAPGAVHLPQPVSTRSQHTQPTPEPSTAPSTSFLLPMGPSPPAEGSTGDTGEPKSSDKTHTCPPCPAPEAAGAPSVFLFPPKPKDTLMISRTPEVTCVVVDVSHEDPEVKFNWYVDGVEVHNAKTKPREEQYNSTYRVVSVLTVLHQDWLNGKAYACAVSNKALPAPIEKTISKAKGQPREPQVYTLPPSRDELTKNQVSLTCLVKGFYPSDIAVEWESNGQPENNYKTTPPVLDSDGSFFLYSKLTVDKSRWQQGNVFSCSVMHEALHNHYTQKSLSLSPGQRHNNSSLNTRTQKARHSPNSEVQLLESGGGLVQPGGSLRLSCAASGFTFSNYNMYWVRQAPGKGLEWVSYISPSGGMTKYADSVKGRFTISRDNSKNTLYLQMNSLRAEDTAVYYCARRGVLGYYGMDVWGQGTMVTVSSGGGGSGGGGSGGGGSQDIQMTQSPSSLSASVGDRVTITCRASQSISSYLNWYQQKPGKAPKLLIYAASSLQSGVPSRFSGSGSGTDFTLTISSLQPEDFATYYCQQSYSTPYTFGQGTKLEIK

SEQ ID NO: 649 - protein, 757 aa, Artificial Sequence
  Made in a lab
MDFQVQIFSFLLISASVIMSRGLPAQVAFTPYAPEPGSTCRLREYYDQTAQMCCSKCSPGQHAKVFCTKTSDTVCDSCEDSTYTQLWNWVPECLSCGSRCSSDQVETQACTREQNRICTCRPGWYCALSKQEGCRLCAPLRKCRPGFGVARPGTETSDVVCKPCAPGTFSNTTSSTDICRPHQICNVVAIPGNASMDAVCTSTSPTRSMAPGAVHLPQPVSTRSQHTQPTPEPSTAPSTSFLLPMGPSPPAEGSTGDTGEPKSSDKTHTCPPCPAPEAAGAPSVFLFPPKPKDTLMISRTPEVTCVVVDVSHEDPEVKFNWYVDGVEVHNAKTKPREEQYNSTYRVVSVLTVLHQDWLNGKAYACAVSNKALPAPIEKTISKAKGQPREPQVYTLPPSRDELTKNQVSLTCLVKGFYPSDIAVEWESNGQPENNYKTTPPVLDSDGSFFLYSKLTVDKSRWQQGNVFSCSVMHEALHNHYTQKSLSLSPGQRHNNSSLNTRTQKARHSPNSEVQLLESGGGLVQPGGSLRLSCAASGFTFSLYSMNWVRQAPGKGLEWVSSISSSGGATLYADSVKGRFTISRDNSKNTLYLQMNSLRAEDTAVYYCARDLISSGYYPDAFDIWGQGTMVTVSSGGGGSGGGGSGGGGSQDIQMTQSPGTLSLSPGERATLSCRASQSVSSSYLAWYQQKPGQAPRLLIYGASNRVTGIPDRFSGSGSGTDFTLTISRLEPEDSAVYYCHQYGSQYTFGPGTKLEIK

SEQ ID NO: 650 - protein, 762 aa, Artificial Sequence [sequence omitted]

SEQ ID NO: 651 - protein, 755 aa, Artificial Sequence
  Made in a lab
MDFQVQIFSFLLISASVIMSRGLPAQVAFTPYAPEPGSTCRLREYYDQTAQMCCSKCSPGQHAKVFCTKTSDTVCDSCEDSTYTQLWNWVPECLSCGSRCSSDQVETQACTREQNRICTCRPGWYCALSKQEGCRLCAPLRKCRPGFGVARPGTETSDVVCKPCAPGTFSNTTSSTDICRPHQICNVVAIPGNASMDAVCTSTSPTRSMAPGAVHLPQPVSTRSQHTQPTPEPSTAPSTSFLLPMGPSPPAEGSTGDTGEPKSSDKTHTCPPCPAPEAAGAPSVFLFPPKPKDTLMISRTPEVTCVVVDVSHEDPEVKFNWYVDGVEVHNAKTKPREEQYNSTYRVVSVLTVLHQDWLNGKAYACAVSNKALPAPIEKTISKAKGQPREPQVYTLPPSRDELTKNQVSLTCLVKGFYPSDIAVEWESNGQPENNYKTTPPVLDSDGSFFLYSKLTVDKSRWQQGNVFSCSVMHEALHNHYTQKSLSLSPGQRHNNSSLNTRTQKARHSPNSEVQLLESGGGLVQPGGSLRLSCAASGFTFSWYSMIWVRQAPGKGLEWVSSIVPSGGLTWYADSVKGRFTISRDNSKNTLYLQMNSLRAEDTAVYYCARDVYGDYYFDNWGQGTLVTVSSGGGGSGGGGSGGGGSQSELTQPPSVSEAPGQRVTISCSGSTSNIGNNAVIWYQQLPGKAPKLLIYYDDLLPSGVSDRFSGSKSGTSGSLAISGLQSEDEADYYCASWDDNLNGPLFGGGTKLTVL

SEQ ID NO: 652 - protein, 753 aa, Artificial Sequence [sequence omitted]

SEQ ID NO: 653 - protein, 754 aa, Artificial Sequence [sequence omitted]

SEQ ID NO: 654 - protein, 759 aa, Artificial Sequence [sequence omitted]

SEQ ID NO: 655 - protein, 753 aa, Artificial Sequence
  Made in a lab
MDFQVQIFSFLLISASVIMSRGLPAQVAFTPYAPEPGSTCRLREYYDQTAQMCCSKCSPGQHAKVFCTKTSDTVCDSCEDSTYTQLWNWVPECLSCGSRCSSDQVETQACTREQNRICTCRPGWYCALSKQEGCRLCAPLRKCRPGFGVARPGTETSDVVCKPCAPGTFSNTTSSTDICRPHQICNVVAIPGNASMDAVCTSTSPTRSMAPGAVHLPQPVSTRSQHTQPTPEPSTAPSTSFLLPMGPSPPAEGSTGDTGEPKSSDKTHTCPPCPAPEAAGAPSVFLFPPKPKDTLMISRTPEVTCVVVDVSHEDPEVKFNWYVDGVEVHNAKTKPREEQYNSTYRVVSVLTVLHQDWLNGKAYACAVSNKALPAPIEKTISKAKGQPREPQVYTLPPSRDELTKNQVSLTCLVKGFYPSDIAVEWESNGQPENNYKTTPPVLDSDGSFFLYSKLTVDKSRWQQGNVFSCSVMHEALHNHYTQKSLSLSPGQRHNNSSLNTRTQKARHSPNSEVQLLESGGGLVQPGGSLRLSCAASGFTFSSYFMGWVRQAPGKGLEWVSSIWPSGGNTTYADSVKGRFTISRDNSKNTLYLQMNSLRAEDTAVYYCARHVGWGRYFDYWGQGTLVTVSSGGGGSGGGGSGGGGSQDIQMTQSPSSLSASVGDRVTITCRASQNIYHYLHWYQQKPGKAPKLLIYAASTLESGVPSRFSGSGSGTDLTLTINSLQPEDFATYYCQQTYDTPLTFGGGSKVEVK

SEQ ID NO: 656 - protein, 757 aa, Artificial Sequence
  Made in a lab
MDFQVQIFSFLLISASVIMSRGLPAQVAFTPYAPEPGSTCRLREYYDQTAQMCCSKCSPGQHAKVFCTKTSDTVCDSCEDSTYTQLWNWVPECLSCGSRCSSDQVETQACTREQNRICTCRPGWYCALSKQEGCRLCAPLRKCRPGFGVARPGTETSDVVCKPCAPGTFSNTTSSTDICRPHQICNVVAIPGNASMDAVCTSTSPTRSMAPGAVHLPQPVSTRSQHTQPTPEPSTAPSTSFLLPMGPSPPAEGSTGDTGEPKSSDKTHTCPPCPAPEAAGAPSVFLFPPKPKDTLMISRTPEVTCVVVDVSHEDPEVKFNWYVDGVEVHNAKTKPREEQYNSTYRVVSVLTVLHQDWLNGKAYACAVSNKALPAPIEKTISKAKGQPREPQVYTLPPSRDELTKNQVSLTCLVKGFYPSDIAVEWESNGQPENNYKTTPPVLDSDGSFFLYSKLTVDKSRWQQGNVFSCSVMHEALHNHYTQKSLSLSPGQRHNNSSLNTRTQKARHSPNSEVQLLESGGGLVQPGGSLRLSCAASGFTFSAYRMIWVRQAPGKGLEWVSYISSSGGRTDYADSVKGRFTISRDNSKNTLYLQMNSLRAEDTAVYYCTTGGLRYFDWLAPSMDYWGQGTLVTVSSGGGGSGGGGSGGGGSQSALTQPPSVSVSPGQTASITCSGDKLGEKFASWYQQRPGQSPILVIYQDSKRPSGIPERFSGSNSGNTATLTISGTQTMDEADYYCQAWGGSTAYVFGSGTKVTVL

SEQ ID NO: 657 - protein, 752 aa, Artificial Sequence [sequence omitted]

SEQ ID NO: 658 - protein, 754 aa, Artificial Sequence [sequence omitted]

SEQ ID NO: 659 - protein, 754 aa, Artificial Sequence
  Made in a lab
MDFQVQIFSFLLISASVIMSRGLPAQVAFTPYAPEPGSTCRLREYYDQTAQMCCSKCSPGQHAKVFCTKTSDTVCDSCEDSTYTQLWNWVPECLSCGSRCSSDQVETQACTREQNRICTCRPGWYCALSKQEGCRLCAPLRKCRPGFGVARPGTETSDVVCKPCAPGTFSNTTSSTDICRPHQICNVVAIPGNASMDAVCTSTSPTRSMAPGAVHLPQPVSTRSQHTQPTPEPSTAPSTSFLLPMGPSPPAEGSTGDTGEPKSSDKTHTCPPCPAPEAAGAPSVFLFPPKPKDTLMISRTPEVTCVVVDVSHEDPEVKFNWYVDGVEVHNAKTKPREEQYNSTYRVVSVLTVLHQDWLNGKAYACAVSNKALPAPIEKTISKAKGQPREPQVYTLPPSRDELTKNQVSLTCLVKGFYPSDIAVEWESNGQPENNYKTTPPVLDSDGSFFLYSKLTVDKSRWQQGNVFSCSVMHEALHNHYTQKSLSLSPGQRHNNSSLNTRTQKARHSPNSEVQLLESGGGLVQPGGSSRLSCAASGFTFSLYNMQWVRQAPGKGLEWVSGISLSGGKTFYADSVKGRFTISRDNSKNTLYLQMNSLRAEDTAVYYCARDYGVATLDAFDIWGQGTMVTVSSGGGGSGGGGSGGGGSQSELTQTPSVSVSPGQTASITCSGNRLEDKYVHWYQQKPGQSPVLVLYQDNKRPSGIPERFSGSNSGNTATLTISETQTLDEADYYCQAWDSSTREVFGGGTKLTVL

SEQ ID NO: 660 - protein, 761 aa, Artificial Sequence [sequence omitted]

SEQ ID NO: 661 - protein, 757 aa, Artificial Sequence [sequence omitted]

SEQ ID NO: 662 - protein, 755 aa, Artificial Sequence [sequence omitted]

SEQ ID NO: 663 - protein, 755 aa, Artificial Sequence
  Made in a lab
MDFQVQIFSFLLISASVIMSRGLPAQVAFTPYAPEPGSTCRLREYYDQTAQMCCSKCSPGQHAKVFCTKTSDTVCDSCEDSTYTQLWNWVPECLSCGSRCSSDQVETQACTREQNRICTCRPGWYCALSKQEGCRLCAPLRKCRPGFGVARPGTETSDVVCKPCAPGTFSNTTSSTDICRPHQICNVVAIPGNASMDAVCTSTSPTRSMAPGAVHLPQPVSTRSQHTQPTPEPSTAPSTSFLLPMGPSPPAEGSTGDTGEPKSSDKTHTCPPCPAPEAAGAPSVFLFPPKPKDTLMISRTPEVTCVVVDVSHEDPEVKFNWYVDGVEVHNAKTKPREEQYNSTYRVVSVLTVLHQDWLNGKAYACAVSNKALPAPIEKTISKAKGQPREPQVYTLPPSRDELTKNQVSLTCLVKGFYPSDIAVEWESNGQPENNYKTTPPVLDSDGSFFLYSKLTVDKSRWQQGNVFSCSVMHEALHNHYTQKSLSLSPGQRHNNSSLNTRTQKARHSPNSEVQLLESGGGLVQPGGSLRLSCAASGFTFSKYDMWWVRQAPGKGLEWVSSIWPSGGWTSYADSVKGRFTISRDNSKNTLYLQMNSLRAEDTAVYYCAKSRGSPWYGDFDHWGQGTLVTVSSGGGGSGGGGSGGGGSQSELTQPPSVSVAPGETATVTCGGINIGSKSVHWYQQKPDQAPVVVMYFDSDRPSGIPERFSGSNSGDTATLTISRVEAGDEADYYCQVWDSRSDQYVFGFGTKVTVL

SEQ ID NO: 664 - protein, 752 aa, Artificial Sequence
  Made in a lab
MDFQVQIFSFLLISASVIMSRGLPAQVAFTPYAPEPGSTCRLREYYDQTAQMCCSKCSPGQHAKVFCTKTSDTVCDSCEDSTYTQLWNWVPECLSCGSRCSSDQVETQACTREQNRICTCRPGWYCALSKQEGCRLCAPLRKCRPGFGVARPGTETSDVVCKPCAPGTFSNTTSSTDICRPHQICNVVAIPGNASMDAVCTSTSPTRSMAPGAVHLPQPVSTRSQHTQPTPEPSTAPSTSFLLPMGPSPPAEGSTGDTGEPKSSDKTHTCPPCPAPEAAGAPSVFLFPPKPKDTLMISRTPEVTCVVVDVSHEDPEVKFNWYVDGVEVHNAKTKPREEQYNSTYRVVSVLTVLHQDWLNGKAYACAVSNKALPAPIEKTISKAKGQPREPQVYTLPPSRDELTKNQVSLTCLVKGFYPSDIAVEWESNGQPENNYKTTPPVLDSDGSFFLYSKLTVDKSRWQQGNVFSCSVMHEALHNHYTQKSLSLSPGQRHNNSSLNTRTQKARHSPNSEVQLLESGGGLVQPGGSLRLSCAASGFTFSMYTMHWVRQAPGKGLEWVSWISPSGGWTKYADSVKGRFTISRDNSKNTLYLQMNSLRAEDTAVYYCAVSPWGGPFDYWGQGTLVTVSSGGGGSGGGGSGGGGSQDIQMTQSPSTLSASVGDRVTITCRASQSISSWLAWYQQKPGKAPKLLIYKASTLESGVPSRFSAGGSGTEFTLTISSLQPDDFGTYYCQQYNSYSLTFGGGTKVEII

SEQ ID NO: 665 - protein, 757 aa, Artificial Sequence
  Made in a lab
MDFQVQIFSFLLISASVIMSRGLPAQVAFTPYAPEPGSTCRLREYYDQTAQMCCSKCSPGQHAKVFCTKTSDTVCDSCEDSTYTQLWNWVPECLSCGSRCSSDQVETQACTREQNRICTCRPGWYCALSKQEGCRLCAPLRKCRPGFGVARPGTETSDVVCKPCAPGTFSNTTSSTDICRPHQICNVVAIPGNASMDAVCTSTSPTRSMAPGAVHLPQPVSTRSQHTQPTPEPSTAPSTSFLLPMGPSPPAEGSTGDTGEPKSSDKTHTCPPCPAPEAAGAPSVFLFPPKPKDTLMISRTPEVTCVVVDVSHEDPEVKFNWYVDGVEVHNAKTKPREEQYNSTYRVVSVLTVLHQDWLNGKAYACAVSNKALPAPIEKTISKAKGQPREPQVYTLPPSRDELTKNQVSLTCLVKGFYPSDIAVEWESNGQPENNYKTTPPVLDSDGSFFLYSKLTVDKSRWQQGNVFSCSVMHEALHNHYTQKSLSLSPGQRHNNSSLNTRTQKARHSPNSEVQLLESGGGLVQPGGSLRLSCAASGFTFSQYFMMWVRQAPGKGLEWVSSISPSGGYTQYADSVKGRFTISRDNSKNTLYLQMNSLRAEDTAVYYCAKTGDYTRYYSYGMDVWGQGTLVTVSSGGGGSGGGGSGGGGSQDIQMTQSPSSLSASVGDRVTITCRASQSISSYLNWYQQKPGKAPKLLIYAASSLQSGVPSRFSGSGSGTDFTLIISSLQPEDFATYYCQQSYSTPLTFGGGTKVEIK

SEQ ID NO: 666 - protein, 758 aa, Artificial Sequence
  Made in a lab
MDFQVQIFSFLLISASVIMSRGLPAQVAFTPYAPEPGSTCRLREYYDQTAQMCCSKCSPGQHAKVFCTKTSDTVCDSCEDSTYTQLWNWVPECLSCGSRCSSDQVETQACTREQNRICTCRPGWYCALSKQEGCRLCAPLRKCRPGFGVARPGTETSDVVCKPCAPGTFSNTTSSTDICRPHQICNVVAIPGNASMDAVCTSTSPTRSMAPGAVHLPQPVSTRSQHTQPTPEPSTAPSTSFLLPMGPSPPAEGSTGDTGEPKSSDKTHTCPPCPAPEAAGAPSVFLFPPKPKDTLMISRTPEVTCVVVDVSHEDPEVKFNWYVDGVEVHNAKTKPREEQYNSTYRVVSVLTVLHQDWLNGKAYACAVSNKALPAPIEKTISKAKGQPREPQVYTLPPSRDELTKNQVSLTCLVKGFYPSDIAVEWESNGQPENNYKTTPPVLDSDGSFFLYSKLTVDKSRWQQGNVFSCSVMHEALHNHYTQKSLSLSPGQRHNNSSLNTRTQKARHSPNSEVQLLESGGGLVQPGGSLRLSCAASGFTFSGYSMAWVRQAPGKGLEWVSGIYSSGGWTWYADSVKGRFTISRDNSKNTLYLQMNSLRAEDTAVYYCTRDQSFSYDSSLDAFDIWGQGTMVTVSSGGGGSGGGGSGGGGSQDIQMTQSPSSLSASVGDRVTITCRASQSINNYLNWYQQKPGKAPKLLIYTASTLHSGVPSRFSGSGSGTDFTLTISNLQPEDFATYYCQQSYATLRTFGQGTKVEIK

SEQ ID NO: 667 - protein, 760 aa, Artificial Sequence [sequence omitted]

SEQ ID NO: 668 - protein, 752 aa, Artificial Sequence
  Made in a lab
MDFQVQIFSFLLISASVIMSRGLPAQVAFTPYAPEPGSTCRLREYYDQTAQMCCSKCSPGQHAKVFCTKTSDTVCDSCEDSTYTQLWNWVPECLSCGSRCSSDQVETQACTREQNRICTCRPGWYCALSKQEGCRLCAPLRKCRPGFGVARPGTETSDVVCKPCAPGTFSNTTSSTDICRPHQICNVVAIPGNASMDAVCTSTSPTRSMAPGAVHLPQPVSTRSQHTQPTPEPSTAPSTSFLLPMGPSPPAEGSTGDTGEPKSSDKTHTCPPCPAPEAAGAPSVFLFPPKPKDTLMISRTPEVTCVVVDVSHEDPEVKFNWYVDGVEVHNAKTKPREEQYNSTYRVVSVLTVLHQDWLNGKAYACAVSNKALPAPIEKTISKAKGQPREPQVYTLPPSRDELTKNQVSLTCLVKGFYPSDIAVEWESNGQPENNYKTTPPVLDSDGSFFLYSKLTVDKSRWQQGNVFSCSVMHEALHNHYTQKSLSLSPGQRHNNSSLNTRTQKARHSPNSEVQLLESGGGLVQPGGSLRLSCAASGFTFSHYGMDWVRQAPGKGLEWVSSIYSSGGYTLYADSVKGRFTISRDNSKNTLYLQMNSLRAEDTATYYCATRTWADAFDVWGQGTTVTVSSGGGGSGGGGSGGGGSQDIQMTQSPSTLSASVGDRVTFTCRASQSVNNWVAWYQQKPGKAPKLLIYAASSLQSGVPSRFSGSGSGTDFTLTISSLQPEDFATYYCQQSYSMPLTFGGGTKVEIK

SEQ ID NO: 669 - protein, 752 aa, Artificial Sequence
  Made in a lab
MDFQVQIFSFLLISASVIMSRGEVQLLESGGGLVQPGGSLRLSCAASGFTFSHYMMAWVRQAPGKGLEWVSYIYPSGGWTSYADSVKGRFTISRDNSKNTLYLQMNSLRAEDTAVYYCARFDYTIGFDFWGQGTLVTVSSGGGGSGGGGSGGGGSQDIQMTQSPSSLSASVGDRVTITCRASQSISSYLNWYQQKPGKAPKLLIYAASSLQSGVPSRFSGSGSGTDFTLTISSLQPEDFATYYCQQSYSTPRTFGQGTKVEIKTGEPKSSDKTHTCPPCPAPEAAGAPSVFLFPPKPKDTLMISRTPEVTCVVVDVSHEDPEVKFNWYVDGVEVHNAKTKPREEQYNSTYRVVSVLTVLHQDWLNGKAYACAVSNKALPAPIEKTISKAKGQPREPQVYTLPPSRDELTKNQVSLTCLVKGFYPSDIAVEWESNGQPENNYKTTPPVLDSDGSFFLYSKLTVDKSRWQQGNVFSCSVMHEALHNHYTQKSLSLSPGQRHNNSSLNTRTQKARHSPNSLPAQVAFTPYAPEPGSTCRLREYYDQTAQMCCSKCSPGQHAKVFCTKTSDTVCDSCEDSTYTQLWNWVPECLSCGSRCSSDQVETQACTREQNRICTCRPGWYCALSKQEGCRLCAPLRKCRPGFGVARPGTETSDVVCKPCAPGTFSNTTSSTDICRPHQICNVVAIPGNASMDAVCTSTSPTRSMAPGAVHLPQPVSTRSQHTQPTPEPSTAPSTSFLLPMGPSPPAEGSTGD

SEQ ID NO: 670 - protein, 759 aa, Artificial Sequence [sequence omitted]

SEQ ID NO: 671 - DNA, 2270 bp, Artificial Sequence
  Made in a lab
aagcttgccgccatggattttcaagtgcagattttcagcttcctgctaatcagtgcttcagtcataatgtcgcgaggattgcccgcccaggtggcatttacaccctacgccccggagcccgggagcacatgccggctcagagaatactatgaccagacagctcagatgtgctgcagcaaatgctcgccgggccaacatgcaaaagtcttctgtaccaagacctcggacaccgtgtgtgactcctgtgaggacagcacatacacccagctctggaactgggttcccgagtgcttgagctgtggctcccgctgtagctctgaccaggtggaaactcaagcctgcactcgggaacagaaccgcatctgcacctgcaggcccggctggtactgcgcgctgagcaagcaggaggggtgccggctgtgcgcgccgctgcgcaagtgccgcccgggcttcggcgtggccagaccaggaactgaaacatcagacgtggtgtgcaagccctgtgccccggggacgttctccaacacgacttcatccacggatatttgcaggccccaccagatctgtaacgtggtggccatccctgggaatgcaagcatggatgcagtctgcacgtccacgtcccccacccggagtatggccccaggggcagtacacttaccccagccagtgtccacacgatcccaacacacgcagccaactccagaacccagcactgctccaagcacctccttcctgctcccaatgggccccagccccccagctgaagggagcactggcgacaccggtgagcccaaatcttctgacaaaactcacacatgcccaccgtgcccagcacctgaagccgcgggtgcaccgtcagtcttcctcttccccccaaaacccaaggacaccctcatgatctcccggacccctgaggtcacatgcgtggtggtggacgtgagccacgaagaccctgaggtcaagttcaactggtacgtggacggcgtggaggtgcataatgccaagacaaagccgcgggaggagcagtacaacagcacgtaccgtgtggtcagcgtcctcaccgtcctgcaccaggactggctgaatggcaaggcgtacgcgtgcgcggtctccaacaaagccctcccagcccccatcgagaaaaccatctccaaagccaaagggcagccccgagaaccacaggtgtacaccctgcccccatcccgggatgagctgaccaagaaccaggtcagcctgacctgcctggtcaaaggcttctatccaagcgacatcgccgtggagtgggagagcaatgggcagccggagaacaactacaagaccacgcctcccgtgctggactccgacggctccttcttcctctacagcaagctcaccgtggacaagagcaggtggcagcaggggaacgtcttctcatgctccgtgatgcatgaggctctgcacaaccactacacgcagaagagcctctccctgtctccgggtcagaggcacaacaattcttccctgaatacaagaactcagaaagcacgtcattctccgaattctgaagttcaattgttagagtctggtggcggtcttgttcagcctggtggttctttacgtctttcttgcgctgcttccggattcactttctctaagtactctatgcattgggttcgccaagctcctggtaaaggtttggagtgggtttcttctatctggccttctggtggctggactacttatgctgactccgttaaaggtcgcttcactatctctagagacaactctaagaatactctctacttgcagatgaacagcttaagggctgaggacacggccgtgtattactgtgcgagaggtggttattactacgcccttgactactggggccagggaaccctggtcaccgtctcaagcggtggcggcggttcggggggtggcggaagtggaggtggagggagtcagagcgaattgactcagccaccctcagtgtccgtgtccccaggacagacagccaccatcacctgctctggagaaaaattgggggatatatatgcttcctggtatcagcagaagccaggccagtccccggtcttggtcatctatcaagataccaagcggccctcagggatccctgtgcgattctctggctccaactctgggaacacagccactctgaccatcagcgggacccaggctatggatgaggctgactattactgtcaggcgtgggacagcagcacggtattcggcggagggaccaagctgaccgtcctatgagcggccgc

SEQ ID NO: 672 - DNA, 2297 bp, Artificial Sequence
  Made in a lab
aagcttgccgccatggattttcaagtgcagattttcagcttcctgctaatcagtgcttcagtcataatgtcgcgaggattgcccgcccaggtggcatttacaccctacgccccggagcccgggagcacatgccggctcagagaatactatgaccagacagctcagatgtgctgcagcaaatgctcgccgggccaacatgcaaaagtcttctgtaccaagacctcggacaccgtgtgtgactcctgtgaggacagcacatacacccagctctggaactgggttcccgagtgcttgagctgtggctcccgctgtagctctgaccaggtggaaactcaagcctgcactcgggaacagaaccgcatctgcacctgcaggcccggctggtactgcgcgctgagcaagcaggaggggtgccggctgtgcgcgccgctgcgcaagtgccgcccgggcttcggcgtggccagaccaggaactgaaacatcagacgtggtgtgcaagccctgtgccccggggacgttctccaacacgacttcatccacggatatttgcaggccccaccagatctgtaacgtggtggccatccctgggaatgcaagcatggatgcagtctgcacgtccacgtcccccacccggagtatggccccaggggcagtacacttaccccagccagtgtccacacgatcccaacacacgcagccaactccagaacccagcactgctccaagcacctccttcctgctcccaatgggccccagccccccagctgaagggagcactggcgacaccggtgagcccaaatcttctgacaaaactcacacatgcccaccgtgcccagcacctgaagccgcgggtgcaccgtcagtcttcctcttccccccaaaacccaaggacaccctcatgatctcccggacccctgaggtcacatgcgtggtggtggacgtgagccacgaagaccctgaggtcaagttcaactggtacgtggacggcgtggaggtgcataatgccaagacaaagccgcgggaggagcagtacaacagcacgtaccgtgtggtcagcgtcctcaccgtcctgcaccaggactggctgaatggcaaggcgtacgcgtgcgcggtctccaacaaagccctcccagcccccatcgagaaaaccatctccaaagccaaagggcagccccgagaaccacaggtgtacaccctgcccccatcccgggatgagctgaccaagaaccaggtcagcctgacctgcctggtcaaaggcttctatccaagcgacatcgccgtggagtgggagagcaatgggcagccggagaacaactacaagaccacgcctcccgtgctggactccgacggctccttcttcctctacagcaagctcaccgtggacaagagcaggtggcagcaggggaacgtcttctcatgctccgtgatgcatgaggctctgcacaaccactacacgcagaagagcctctccctgtctccgggtcagaggcacaacaattcttccctgaatacaagaactcagaaagcacgtcattctccgaattctgaagttcaattgttagagtctggtggcggtcttgttcagcctggtggttctttacgtctttcttgcgctgcttccggattcactttctctttttaccagatgcattgggttcgccaagctcctggtaaaggtttggagtgggtttctggtatctatccttctggtggctatactaagtatgctgactccgttaaaggtcgcttcactatctctagagacaactctaagaatactctctacttgcagatgaacagcttaagggctgaggacactgcagtctactattgtgcgagagatctagggtacggcagcagctggtactactttgactactggggccagggaaccctggtcaccgtctcaagcggtggcggcggttcggggggtggcggaagtggaggtggagggagtcagagcgctttgactcagcctgcctccgtgtctgggtctcctggacagtcgatcaccatctcctgcagtggaaccgacagtgacgttggtggttataaccatgtctcctggtaccaacaacacccaggcaaggcccccaaactcataatttatgatgtcgatcatcggccctcagggatctctaaccgtttctctggctccaagtctggcaacacggcctccctgaccatctctgggctccaggctgaggacgaggctgattattactgcagctcatatagaagcggtagcacttatgtcttcggaactgggaccaaggtcaccgtcctatgagcggccgc

SEQ ID NO: 673 - DNA, 2276 bp, Artificial Sequence
  Made in a lab
aagcttgccgccatggattttcaagtgcagattttcagcttcctgctaatcagtgcttcagtcataatgtcgcgaggattgcccgcccaggtggcatttacaccctacgccccggagcccgggagcacatgccggctcagagaatactatgaccagacagctcagatgtgctgcagcaaatgctcgccgggccaacatgcaaaagtcttctgtaccaagacctcggacaccgtgtgtgactcctgtgaggacagcacatacacccagctctggaactgggttcccgagtgcttgagctgtggctcccgctgtagctctgaccaggtggaaactcaagcctgcactcgggaacagaaccgcatctgcacctgcaggcccggctggtactgcgcgctgagcaagcaggaggggtgccggctgtgcgcgccgctgcgcaagtgccgcccgggcttcggcgtggccagaccaggaactgaaacatcagacgtggtgtgcaagccctgtgccccggggacgttctccaacacgacttcatccacggatatttgcaggccccaccagatctgtaacgtggtggccatccctgggaatgcaagcatggatgcagtctgcacgtccacgtcccccacccggagtatggccccaggggcagtacacttaccccagccagtgtccacacgatcccaacacacgcagccaactccagaacccagcactgctccaagcacctccttcctgctcccaatgggccccagccccccagctgaagggagcactggcgacaccggtgagcccaaatcttctgacaaaactcacacatgcccaccgtgcccagcacctgaagccgcgggtgcaccgtcagtcttcctcttccccccaaaacccaaggacaccctcatgatctcccggacccctgaggtcacatgcgtggtggtggacgtgagccacgaagaccctgaggtcaagttcaactggtacgtggacggcgtggaggtgcataatgccaagacaaagccgcgggaggagcagtacaacagcacgtaccgtgtggtcagcgtcctcaccgtcctgcaccaggactggctgaatggcaaggcgtacgcgtgcgcggtctccaacaaagccctcccagcccccatcgagaaaaccatctccaaagccaaagggcagccccgagaaccacaggtgtacaccctgcccccatcccgggatgagctgaccaagaaccaggtcagcctgacctgcctggtcaaaggcttctatccaagcgacatcgccgtggagtgggagagcaatgggcagccggagaacaactacaagaccacgcctcccgtgctggactccgacggctccttcttcctctacagcaagctcaccgtggacaagagcaggtggcagcaggggaacgtcttctcatgctccgtgatgcatgaggctctgcacaaccactacacgcagaagagcctctccctgtctccgggtcagaggcacaacaattcttccctgaatacaagaactcagaaagcacgtcattctccgaattctgaagttcaattgttagagtctggtggcggtcttgttcagcctggtggttctttacgtctttcttgcgctgcttccggattcactttctctaagtactctatgcattgggttcgccaagctcctggtaaaggtttggagtgggtttctggtatctctccttctggctatactcgttatgctgactccgttaaaggtcgcttcactatctctagagacaactctaagaatactctctacttgcagatgaacagcttaagggctgaggacacggccgtgtattactgtgcgagggaccagctgctagaggcttttgatatctggggccaagggaccacggtcaccgtctcaagcggtggcggcggttcggggggtggcggaagtggaggtggagggagtcaagacatccagatgacccagtctccactctccctgtctgcatctgtgggagacagagtcaccatcacttgccgggcaagtcagagcattagcagctatttaaattggtatcagcaaaaaccaggggaagcccctaagctcctcatctatgctgcatccgctttgcaaagtggggtcccgtcaaggttcagtggcagtggacttgggacagttttcactctcaccatcaccagcctgcaacctgaagattctgcaacttactattgtcaacagagttacagtcccccggtcactttcggcggagggaccaaggtggagatcaaatgagcggccgc

SEQ ID NO: 674 - DNA, 2279 bp, Artificial Sequence
  Made in a lab
aagcttgccgccatggattttcaagtgcagattttcagcttcctgctaatcagtgcttcagtcataatgtcgcgaggattgcccgcccaggtggcatttacaccctacgccccggagcccgggagcacatgccggctcagagaatactatgaccagacagctcagatgtgctgcagcaaatgctcgccgggccaacatgcaaaagtcttctgtaccaagacctcggacaccgtgtgtgactcctgtgaggacagcacatacacccagctctggaactgggttcccgagtgcttgagctgtggctcccgctgtagctctgaccaggtggaaactcaagcctgcactcgggaacagaaccgcatctgcacctgcaggcccggctggtactgcgcgctgagcaagcaggaggggtgccggctgtgcgcgccgctgcgcaagtgccgcccgggcttcggcgtggccagaccaggaactgaaacatcagacgtggtgtgcaagccctgtgccccggggacgttctccaacacgacttcatccacggatatttgcaggccccaccagatctgtaacgtggtggccatccctgggaatgcaagcatggatgcagtctgcacgtccacgtcccccacccggagtatggccccaggggcagtacacttaccccagccagtgtccacacgatcccaacacacgcagccaactccagaacccagcactgctccaagcacctccttcctgctcccaatgggccccagccccccagctgaagggagcactggcgacaccggtgagcccaaatcttctgacaaaactcacacatgcccaccgtgcccagcacctgaagccgcgggtgcaccgtcagtcttcctcttccccccaaaacccaaggacaccctcatgatctcccggacccctgaggtcacatgcgtggtggtggacgtgagccacgaagaccctgaggtcaagttcaactggtacgtggacggcgtggaggtgcataatgccaagacaaagccgcgggaggagcagtacaacagcacgtaccgtgtggtcagcgtcctcaccgtcctgcaccaggactggctgaatggcaaggcgtacgcgtgcgcggtctccaacaaagccctcccagcccccatcgagaaaaccatctccaaagccaaagggcagccccgagaaccacaggtgtacaccctgcccccatcccgggatgagctgaccaagaaccaggtcagcctgacctgcctggtcaaaggcttctatccaagcgacatcgccgtggagtgggagagcaatgggcagccggagaacaactacaagaccacgcctcccgtgctggactccgacggctccttcttcctctacagcaagctcaccgtggacaagagcaggtggcagcaggggaacgtcttctcatgctccgtgatgcatgaggctctgcacaaccactacacgcagaagagcctctccctgtctccgggtcagaggcacaacaattcttccctgaatacaagaactcagaaagcacgtcattctccgaattctgaagttcaattgttagagtctggtggcggtcttgttcagcctggtggttctttacgtctttcttgcgctgcttccggattcactttctctgagtaccctatgaattgggttcgccaagctcctggtaaaggtttggagtgggtttctggtatctattcttctggtggccttactaagtatgctgactccgttaaaggtcgcttcactatctctagagacaactctaagaatactctctacttgcagatgaacagcttaagggctgaggacacggccgtgtattactgtgcgagagatcactacggtgactacgcatttgactactggggccagggaaccctggtcaccgtctcaagcggtggcggcggttcggggggtggcggaagtggaggtggagggagtcaagacatccagatgacccagtctccttccaccctgtctgcatctgtaggagacagagtcaccatcacttgccgggccagtcagagtattagtagctggttggcctggtatcagcagaaaccagggaaagcccctaagctcctgatctataaggcatctagtttagaaagtggggtcccatcaaggttcagcggcagtggatctgggacagaattcactctcaccatcagcagcctgcagcctgatgattttgcaacttattactgccaacagtataatagttattggacgttcggccaagggaccaaggtggaaatcaaatgagcggccgc

SEQ ID NO: 675 - DNA, 2306 bp, Artificial Sequence
  Made in a lab
agcttgccgccatggattttcaagtgcagattttcagcttcctgctaatcagtgcttcagtcataatgtcgcgaggattgcccgcccaggtggcatttacaccctacgccccggagcccgggagcacatgccggctcagagaatactatgaccagacagctcagatgtgctgcagcaaatgctcgccgggccaacatgcaaaagtcttctgtaccaagacctcggacaccgtgtgtgactcctgtgaggacagcacatacacccagctctggaactgggttcccgagtgcttgagctgtggctcccgctgtagctctgaccaggtggaaactcaagcctgcactcgggaacagaaccgcatctgcacctgcaggcccggctggtactgcgcgctgagcaagcaggaggggtgccggctgtgcgcgccgctgcgcaagtgccgcccgggcttcggcgtggccagaccaggaactgaaacatcagacgtggtgtgcaagccctgtgccccggggacgttctccaacacgacttcatccacggatatttgcaggccccaccagatctgtaacgtggtggccatccctgggaatgcaagcatggatgcagtctgcacgtccacgtcccccacccggagtatggccccaggggcagtacacttaccccagccagtgtccacacgatcccaacacacgcagccaactccagaacccagcactgctccaagcacctccttcctgctcccaatgggccccagccccccagctgaagggagcactggcgacaccggtgagcccaaatcttctgacaaaactcacacatgcccaccgtgcccagcacctgaagccgcgggtgcaccgtcagtcttcctcttccccccaaaacccaaggacaccctcatgatctcccggacccctgaggtcacatgcgtggtggtggacgtgagccacgaagaccctgaggtcaagttcaactggtacgtggacggcgtggaggtgcataatgccaagacaaagccgcgggaggagcagtacaacagcacgtaccgtgtggtcagcgtcctcaccgtcctgcaccaggactggctgaatggcaaggcgtacgcgtgcgcggtctccaacaaagccctcccagcccccatcgagaaaaccatctccaaagccaaagggcagccccgagaaccacaggtgtacaccctgcccccatcccgggatgagctgaccaagaaccaggtcagcctgacctgcctggtcaaaggcttctatccaagcgacatcgccgtggagtgggagagcaatgggcagccggagaacaactacaagaccacgcctcccgtgctggactccgacggctccttcttcctctacagcaagctcaccgtggacaagagcaggtggcagcaggggaacgtcttctcatgctccgtgatgcatgaggctctgcacaaccactacacgcagaagagcctctccctgtctccgggtcagaggcacaacaattcttccctgaatacaagaactcagaaagcacgtcattctccgaattctgaagttcaattgttagagtctggtggcggtcttgttcagcctggtggttctttacgtctttcttgcgctgcttccggattcactttctctctttacgagatggtttgggttcgccaagctcctggtaaaggtttggagtgggtttctggtatctggccttctggtggctggactcagtatgctgactccgttaaaggtcgcttcactatctctagagacaactctaagaatactctctacttgcagatgaacagcttaagggctgaggacacggccgtgtattactgtgcgagagatctagcagtggctggttgggattactactactactacggtatggacgtctggggccaagggaccacggtcaccgtctcaagcggtggcggcggttcggggggtggcggaagtggaggtggagggagtcaagacatccagatgacccagtctccagccaccctgtctttgtctccaggggaaagagccaccctctcctgcagggccagtcagagtgtcagcagctacttagcctggtaccaacagaaacctggccaggctcccaggctcctcatctatgatgcatccaacagggccactggcatcccagccaggttcagtggcagtgggtctgggacagacttcactctcaccatcagcagcctagagcctgaagattctgcagtttattactgtcagcaacgtagcaactggcctccgttcactttcggcggagggaccaaggtggagatcaaatgagcggccgcc

SEQ ID NO: 676 - DNA, 2300 bp, Artificial Sequence
  Made in a lab
aagcttgccgccatggattttcaagtgcagattttcagcttcctgctaatcagtgcttcagtcataatgtcgcgaggattgcccgcccaggtggcatttacaccctacgccccggagcccgggagcacatgccggctcagagaatactatgaccagacagctcagatgtgctgcagcaaatgctcgccgggccaacatgcaaaagtcttctgtaccaagacctcggacaccgtgtgtgactcctgtgaggacagcacatacacccagctctggaactgggttcccgagtgcttgagctgtggctcccgctgtagctctgaccaggtggaaactcaagcctgcactcgggaacagaaccgcatctgcacctgcaggcccggctggtactgcgcgctgagcaagcaggaggggtgccggctgtgcgcgccgctgcgcaagtgccgcccgggcttcggcgtggccagaccaggaactgaaacatcagacgtggtgtgcaagccctgtgccccggggacgttctccaacacgacttcatccacggatatttgcaggccccaccagatctgtaacgtggtggccatccctgggaatgcaagcatggatgcagtctgcacgtccacgtcccccacccggagtatggccccaggggcagtacacttaccccagccagtgtccacacgatcccaacacacgcagccaactccagaacccagcactgctccaagcacctccttcctgctcccaatgggccccagccccccagctgaagggagcactggcgacaccggtgagcccaaatcttctgacaaaactcacacatgcccaccgtgcccagcacctgaagccgcgggtgcaccgtcagtcttcctcttccccccaaaacccaaggacaccctcatgatctcccggacccctgaggtcacatgcgtggtggtggacgtgagccacgaagaccctgaggtcaagttcaactggtacgtggacggcgtggaggtgcataatgccaagacaaagccgcgggaggagcagtacaacagcacgtaccgtgtggtcagcgtcctcaccgtcctgcaccaggactggctgaatggcaaggcgtacgcgtgcgcggtctccaacaaagccctcccagcccccatcgagaaaaccatctccaaagccaaagggcagccccgagaaccacaggtgtacaccctgcccccatcccgggatgagctgaccaagaaccaggtcagcctgacctgcctggtcaaaggcttctatccaagcgacatcgccgtggagtgggagagcaatgggcagccggagaacaactacaagaccacgcctcccgtgctggactccgacggctccttcttcctctacagcaagctcaccgtggacaagagcaggtggcagcaggggaacgtcttctcatgctccgtgatgcatgaggctctgcacaaccactacacgcagaagagcctctccctgtctccgggtcagaggcacaacaattcttccctgaatacaagaactcagaaagcacgtcattctccgaattctgaagttcaattgttagagtctggtggcggccttgttcagcctggtggttctttacgtctttcttgcgctgcttccggattcactttctctcagtacaatatgatttgggttcgccaagctcctggtaaaggtttggagtgggtttcttggatctcttcttctggcggtactgagtatgctgactccgttaaaggtcgcttcactatctctagagacaactctaagaatactctctacttgcagatgaacagcttaagggctgaggacacggccgtgtattactgtgcaaaagaccgaggatatggttcggggagttatggggcttatgatgcttttgatatctggggtcaagggacaatggtcaccgtctcaagcggtggcggcggttcggggggtggcggaagtggaggtggagggagtcaagacatccagatgacccagtctccatcctccctgtctgcatctgtaggagacagagtcaccatcacttgccagacaagtcagagcattgacaggtatttaaattggtatcagcagaaagcaggggaagcccctaaactcctgatctatgctgcatccagtttgcaaagtggggtcccatcaaggttcagtggcagtggatctgggacagatttcactctcaccatcagcagtctgcaacctgaagattttgcaagttactactgtcaacagagttacaggaccccccggacgttcggccaagggaccaaggtggagatcaaatgagcggccgc

SEQ ID NO: 677 - DNA, 2285 bp, Artificial Sequence
  Made in a lab
aagcttgccgccatggattttcaagtgcagattttcagcttcctgctaatcagtgcttcagtcataatgtcgcgaggattgcccgcccaggtggcatttacaccctacgccccggagcccgggagcacatgccggctcagagaatactatgaccagacagctcagatgtgctgcagcaaatgctcgccgggccaacatgcaaaagtcttctgtaccaagacctcggacaccgtgtgtgactcctgtgaggacagcacatacacccagctctggaactgggttcccgagtgcttgagctgtggctcccgctgtagctctgaccaggtggaaactcaagcctgcactcgggaacagaaccgcatctgcacctgcaggcccggctggtactgcgcgctgagcaagcaggaggggtgccggctgtgcgcgccgctgcgcaagtgccgcccgggcttcggcgtggccagaccaggaactgaaacatcagacgtggtgtgcaagccctgtgccccggggacgttctccaacacgacttcatccacggatatttgcaggccccaccagatctgtaacgtggtggccatccctgggaatgcaagcatggatgcagtctgcacgtccacgtcccccacccggagtatggccccaggggcagtacacttaccccagccagtgtccacacgatcccaacacacgcagccaactccagaacccagcactgctccaagcacctccttcctgctcccaatgggccccagccccccagctgaagggagcactggcgacaccggtgagcccaaatcttctgacaaaactcacacatgcccaccgtgcccagcacctgaagccgcgggtgcaccgtcagtcttcctcttccccccaaaacccaaggacaccctcatgatctcccggacccctgaggtcacatgcgtggtggtggacgtgagccacgaagaccctgaggtcaagttcaactggtacgtggacggcgtggaggtgcataatgccaagacaaagccgcgggaggagcagtacaacagcacgtaccgtgtggtcagcgtcctcaccgtcctgcaccaggactggctgaatggcaaggcgtacgcgtgcgcggtctccaacaaagccctcccagcccccatcgagaaaaccatctccaaagccaaagggcagccccgagaaccacaggtgtacaccctgcccccatcccgggatgagctgaccaagaaccaggtcagcctgacctgcctggtcaaaggcttctatccaagcgacatcgccgtggagtgggagagcaatgggcagccggagaacaactacaagaccacgcctcccgtgctggactccgacggctccttcttcctctacagcaagctcaccgtggacaagagcaggtggcagcaggggaacgtcttctcatgctccgtgatgcatgaggctctgcacaaccactacacgcagaagagcctctccctgtctccgggtcagaggcacaacaattcttccctgaatacaagaactcagaaagcacgtcattctccgaattctgaagttcaattgttagagtctggtggcggtcttgttcagcctggtggttctttacgtctttcttgcgctgcttccggattcactttctctcattactctatgggttgggttcgccaagctcctggtaaaggtttggagtgggtttcttctatctatccttctggtggctctactctttatgctgactccgttaaaggtcgcttcactatctctagagacaactctaagaatactctctacttgcagatgaacagcttaagggctgaggacacggccgtgtattactgtgcgagatggggagtgggagctacgttcgactactggggccagggcaccctggtcaccgtctcaagcggtggcggcggttcggggggtggcggaagtggaggtggagggagtcaagacatccagatgacccagtctccaggcaccctgtctttgtctccaggggaaagagccaccctctcctgcagggccagtcagagtgttagcagcagctacttagcctggtaccagcagaaacctggccaggctcccaggctcctcatctatggtgcatccagcagggccactggcatcccagacaggttcagtggcagtgggtctgggacagacttcactctcaccatcagcagactggagcctgaagattttgcagtgtattactgtcagcagtatggtagctcacctctctggacgttcggccaagggaccaaggtsgaaatcaaatgagcggccgc

SEQ ID NO: 678 - DNA, 2279 bp, Artificial Sequence
  Made in a lab
aagcttgccgccatggattttcaagtgcagattttcagcttcctgctaatcagtgcttcagtcataatgtcgcgaggattgcccgcccaggtggcatttacaccctacgccccggagcccgggagcacatgccggctcagagaatactatgaccagacagctcagatgtgctgcagcaaatgctcgccgggccaacatgcaaaagtcttctgtaccaagacctcggacaccgtgtgtgactcctgtgaggacagcacatacacccagctctggaactgggttcccgagtgcttgagctgtggctcccgctgtagctctgaccaggtggaaactcaagcctgcactcgggaacagaaccgcatctgcacctgcaggcccggctggtactgcgcgctgagcaagcaggaggggtgccggctgtgcgcgccgctgcgcaagtgccgcccgggcttcggcgtggccagaccaggaactgaaacatcagacgtggtgtgcaagccctgtgccccggggacgttctccaacacgacttcatccacggatatttgcaggccccaccagatctgtaacgtggtggccatccctgggaatgcaagcatggatgcagtctgcacgtccacgtcccccacccggagtatggccccaggggcagtacacttaccccagccagtgtccacacgatcccaacacacgcagccaactccagaacccagcactgctccaagcacctccttcctgctcccaatgggccccagccccccagctgaagggagcactggcgacaccggtgagcccaaatcttctgacaaaactcacacatgcccaccgtgcccagcacctgaagccgcgggtgcaccgtcagtcttcctcttccccccaaaacccaaggacaccctcatgatctcccggacccctgaggtcacatgcgtggtggtggacgtgagccacgaagaccctgaggtcaagttcaactggtacgtggacggcgtggaggtgcataatgccaagacaaagccgcgggaggagcagtacaacagcacgtaccgtgtggtcagcgtcctcaccgtcctgcaccaggactggctgaatggcaaggcgtacgcgtgcgcggtctccaacaaagccctcccagcccccatcgagaaaaccatctccaaagccaaagggcagccccgagaaccacaggtgtacaccctgcccccatcccgggatgagctgaccaagaaccaggtcagcctgacctgcctggtcaaaggcttctatccaagcgacatcgccgtggagtgggagagcaatgggcagccggagaacaactacaagaccacgcctcccgtgctggactccgacggctccttcttcctctacagcaagctcaccgtggacaagagcaggtggcagcaggggaacgtcttctcatgctccgtgatgcatgaggctctgcacaaccactacacgcagaagagcctctccctgtctccgggtcagaggcacaacaattcttccctgaatacaagaactcagaaagcacgtcattctccgaattctgaagttcaattgttagagtctggtggcggtcttgttcagcctggtggttctttacgtctttcttgcgctgcttccggattcactttctctcattacatgatggcttgggttcgccaagctcctggtaaaggtttggagtgggtttcttatatctatccttctggtggctggacttcttatgctgactccgttaaaggtcgcttcactatctctagagacaactctaagaatactctctacttgcagatgaacagcttaagggctgaggacacggccgtgtattactgtgcgagattcgactatactataggttttgacttctggggccagggaaccctggtcaccgtctcaagcggtggcggcggttcggggggtggcggaagtggaggtggagggagtcaagacatccagatgacccagtctccatcctccctgtctgcatctgtaggagacagagtcaccatcacttgccgggcaagtcagagcattagcagctatttaaattggtatcagcagaaaccagggaaagcccctaagctcctgatctatgctgcatccagtttgcaaagtggggtcccatcaaggttcagtggcagtggatctgggacagatttcactctcaccatcagcagtctgcaacctgaagattttgcaacttactactgtcaacagagttacagtacccctcggacgttcggccaagggaccaaggtggaaatcaaatgagcggccgc

SEQ ID NO: 679 - DNA, 2376 bp, Artificial Sequence
  Made in a lab
ggcttatcgaattaatacgactcactatagggagacccaagcttgccgccatggattttcaagtgcagattttcagcttcctgctaatcagtgcttcagtcataatgtcgcgaggattgcccgcccaggtggcatttacaccctacgccccggagcccgggagcacatgccggctcagagaatactatgaccagacagctcagatgtgctgcagcaaatgctcgccgggccaacatgcaaaagtcttctgtaccaagacctcggacaccgtgtgtgactcctgtgaggacagcacatacacccagctctggaactgggttcccgagtgcttgagctgtggctcccgctgtagctctgaccaggtggaaactcaagcctgcactcgggaacagaaccgcatctgcacctgcaggcccggctggtactgcgcgctgagcaagcaggaggggtgccggctgtgcgcgccgctgcgcaagtgccgcccgggcttcggcgtggccagaccaggaactgaaacatcagacgtggtgtgcaagccctgtgccccggggacgttctccaacacgacttcatccacggatatttgcaggccccaccagatctgtaacgtggtggccatccctgggaatgcaagcatggatgcagtctgcacgtccacgtcccccacccggagtatggccccaggggcagtacacttaccccagccagtgtccacacgatcccaacacacgcagccaactccagaacccagcactgctccaagcacctccttcctgctcccaatgggccccagccccccagctgaagggagcactggcgacaccggtgagcccaaatcttctgacaaaactcacacatgcccaccgtgcccagcacctgaagccgcgggtgcaccgtcagtcttcctcttccccccaaaacccaaggacaccctcatgatctcccggacccctgaggtcacatgcgtggtggtggacgtgagccacgaagaccctgaggtcaagttcaactggtacgtggacggcgtggaggtgcataatgccaagacaaagccgcgggaggagcagtacaacagcacgtaccgtgtggtcagcgtcctcaccgtcctgcaccaggactggctgaatggcaaggcgtacgcgtgcgcggtctccaacaaagccctcccagcccccatcgagaaaaccatctccaaagccaaagggcagccccgagaaccacaggtgtacaccctgcccccatcccgggatgagctgaccaagaaccaggtcagcctgacctgcctggtcaaaggcttctatccaagcgacatcgccgtggagtgggagagcaatgggcagccggagaacaactacaagaccacgcctcccgtgctggactccgacggctccttcttcctctacagcaagctcaccgtggacaagagcaggtggcagcaggggaacgtcttctcatgctccgtgatgcatgaggctctgcacaaccactacacgcagaagagcctctccctgtctccgggtcagaggcacaacaattcttccctgaatacaagaactcagaaagcacgtcattctccgaattctgaagttcaattgttagagtctggtggcggtcttgttcagcctggtggttctttacgtctttcttgcgctgcttccggattcactttctctcattacggtatgacttgggttcgccaagctcctggtaaaggtttggagtgggtttctggtatccgttcttctggtggcgttactaattatgctgactccgttaaaggtcgcttcactatctctagagacaactctaagaatactctctacttgcagatgaacagcttaagggctgaggacacggccgtgtattactgtgcgagagagggcagtggctggtccaaggcttttgatatctggggccaagggacaatggtcaccgtctcaagcggtggcggcggttcggggggtggcggaagtggaggtggagggagtcaagacatccagatgacccagtctccagccaccctgtctttgtctccaggagaaagagccaccctctcctgtagggccagccagagtattagcacctccttagcctggtaccaacaaatacctgggcaggctcccaggctcctcatgtatgatgcatccaagagggccagtggcatcccggccaggttcagtggcagtgggtctgggacagacctcactctcaccatcagcagcctcgagcctgaagattctgcggtttattactgtcagctgcgtataaactggcctccggaattcactttcggccctgggaccaaagtggatatcaaatgagcggccgcctcgagtctagagggccctattctatagtgtcacctaaatgctagag

SEQ ID NO: 680 - DNA, 2306 bp, Artificial Sequence
  Made in a lab
aagcttgccgccatggattttcaagtgcagattttcagcttcctgctaatcagtgcttcagtcataatgtcgcgaggattgcccgcccaggtggcatttacaccctacgccccggagcccgggagcacatgccggctcagagaatactatgaccagacagctcagatgtgctgcagcaaatgctcgccgggccaacatgcaaaagtcttctgtaccaagacctcggacaccgtgtgtgactcctgtgaggacagcacatacacccagctctggaactgggttcccgagtgcttgagctgtggctcccgctgtagctctgaccaggtggaaactcaagcctgcactcgggaacagaaccgcatctgcacctgcaggcccggctggtactgcgcgctgagcaagcaggaggggtgccggctgtgcgcgccgctgcgcaagtgccgcccgggcttcggcgtggccagaccaggaactgaaacatcagacgtggtgtgcaagccctgtgccccggggacgttctccaacacgacttcatccacggatatttgcaggccccaccagatctgtaacgtggtggccatccctgggaatgcaagcatggatgcagtctgcacgtccacgtcccccacccggagtatggccccaggggcagtacacttaccccagccagtgtccacacgatcccaacacacgcagccaactccagaacccagcactgctccaagcacctccttcctgctcccaatgggccccagccccccagctgaagggagcactggcgacaccggtgagcccaaatcttctgacaaaactcacacatgcccaccgtgcccagcacctgaagccgcgggtgcaccgtcagtcttcctcttccccccaaaacccaaggacaccctcatgatctcccggacccctgaggtcacatgcgtggtggtggacgtgagccacgaagaccctgaggtcaagttcaactggtacgtggacggcgtggaggtgcataatgccaagacaaagccgcgggaggagcagtacaacagcacgtaccgtgtggtcagcgtcctcaccgtcctgcaccaggactggctgaatggcaaggcgtacgcgtgcgcggtctccaacaaagccctcccagcccccatcgagaaaaccatctccaaagccaaagggcagccccgagaaccacaggtgtacaccctgcccccatcccgggatgagctgaccaagaaccaggtcagcctgacctgcctggtcaaaggcttctatccaagcgacatcgccgtggagtgggagagcaatgggcagccggagaacaactacaagaccacgcctcccgtgctggactccgacggctccttcttcctctacagcaagctcaccgtggacaagagcaggtggcagcaggggaacgtcttctcatgctccgtgatgcatgaggctctgcacaaccactacacgcagaagagcctctccctgtctccgggtcagaggcacaacaattcttccctgaatacaagaactcagaaagcacgtcattctccgaattctgaagttcaattgttagagtctggtggcggtcttgttcagcctggtggttctttacgtctttcttgcgctgcttccggattcactttctctcattacaatatgcgttgggttcgccaagctcctggtaaaggtttggagtgggtttcttctatctctccttctggtggctttactggttatgctgactccgttaaaggtcgcttcactatctctagagacaactctaagaatactctctacttgcagatgaacagcttaagggctgaggacacggccgtgtattactgtgcaagagggatcaattactatgatagtagtggttattaccccccggtcggtatggacgtctggggccaagggaccacggtcaccgtctcaagcggtggcggcggttcggggggtggcggaagtggaggtggagggagtcaagacatccagatgacccagtctccatcttccgtgtctgcatctgtaggagacagagtcaccatcacttgtcgggcgagtcggggtgttatcacctggttaaactggtatcaacagaaaccagggagagtccctagccccctgatctttggtgcatccactttgcaaactggggtcccatcaagattcagcggcagtggatctgggacagatttcactctcaccatcaacgacctgcagcctgaagattttgcaacttactattgtcaacagactcacagtttccctctcactttcggcggagggaccaaggtggagatcaaatgagcggccgc

SEQ ID NO: 681 - DNA, 2288 bp, Artificial Sequence
  Made in a lab
aagcttgccgccatggattttcaagtgcagattttcagcttcctgctaatcagtgcttcagtcataatgtcgcgaggattgcccgcccaggtggcatttacaccctacgccccggagcccgggagcacatgccggctcagagaatactatgaccagacagctcagatgtgctgcagcaaatgctcgccgggccaacatgcaaaagtcttctgtaccaagacctcggacaccgtgtgtgactcctgtgaggacagcacatacacccagctctggaactgggttcccgagtgcttgagctgtggctcccgctgtagctctgaccaggtggaaactcaagcctgcactcgggaacagaaccgcatctgcacctgcaggcccggctggtactgcgcgctgagcaagcaggaggggtgccggctgtgcgcgccgctgcgcaagtgccgcccgggcttcggcgtggccagaccaggaactgaaacatcagacgtggtgtgcaagccctgtgccccggggacgttctccaacacgacttcatccacggatatttgcaggccccaccagatctgtaacgtggtggccatccctgggaatgcaagcatggatgcagtctgcacgtccacgtcccccacccggagtatggccccaggggcagtacacttaccccagccagtgtccacacgatcccaacacacgcagccaactccagaacccagcactgctccaagcacctccttcctgctcccaatgggccccagccccccagctgaagggagcactggcgacaccggtgagcccaaatcttctgacaaaactcacacatgcccaccgtgcccagcacctgaagccgcgggtgcaccgtcagtcttcctcttccccccaaaacccaaggacaccctcatgatctcccggacccctgaggtcacatgcgtggtggtggacgtgagccacgaagaccctgaggtcaagttcaactggtacgtggacggcgtggaggtgcataatgccaagacaaagccgcgggaggagcagtacaacagcacgtaccgtgtggtcagcgtcctcaccgtcctgcaccaggactggctgaatggcaaggcgtacgcgtgcgcggtctccaacaaagccctcccagcccccatcgagaaaaccatctccaaagccaaagggcagccccgagaaccacaggtgtacaccctgcccccatcccgggatgagctgaccaagaaccaggtcagcctgacctgcctggtcaaaggcttctatccaagcgacatcgccgtggagtgggagagcaatgggcagccggagaacaactacaagaccacgcctcccgtgctggactccgacggctccttcttcctctacagcaagctcaccgtggacaagagcaggtggcagcaggggaacgtcttctcatgctccgtgatgcatgaggctctgcacaaccactacacgcagaagagcctctccctgtctccgggtcagaggcacaacaattcttccctgaatacaagaactcagaaagcacgtcattctccgaattctgaagttcaattgttagagtctggtggcggtcttgttcagcctggtggttctttacgtctttcttgcgctgcttccggattcactttctcttggtacaatatgctttgggttcgccaagctcctggtaaaggtttggagtgggtttcttctatctctccttctggtggctatactgtttatgctgactccgttaaaggtcgcttcactatctctagagacaactctaagaatactctctacttgcagatgaacagcttaagggctgaggacacggccgtgtattactgtgcacgggaccgtggtgggagccccttccggcctgatgcttttgatatctggggccaagggacaatggtcaccgtctcaagcggtggcggcggttcggggggtggcggaagtggaggtggagggagtcagagcgctttgactcagccaccctcagtgtccgtgtccccaggacagacagccaggatcacctgctctggagataagttgggggaaaaatatgtttcctggtatcagcagcggtcaggccagtcccctctactggtcatttctcaagataccaagcggccctcagggatccctgagcgattctctggctccaactctgggaacacagccactctgaccatcagcggggcccaggctgcagatgaggctgactattactgtcagacgtgggacagcgacacttatgtcttcggaagtgggagcacggtcaccgtcctgtgagcggccgc

SEQ ID NO: 682 - DNA, 2389 bp, Artificial Sequence
  Made in a lab
tggcttatcgattaatacgactcactatagggagacccaagcttgccgccatggattttcaagtgcagattttcagcttcctgctaatcagtgcttcagtcataatgtcgcgaggattgcccgcccaggtggcatttacaccctacgccccggagcccgggagcacatgccggctcagagaatactatgaccagacagctcagatgtgctgcagcaaatgctcgccgggccaacatgcaaaagtcttctgtaccaagacctcggacaccgtgtgtgactcctgtgaggacagcacatacacccagctctggaactgggttcccgagtgcttgagctgtggctcccgctgtagctctgaccaggtggaaactcaagcctgcactcgggaacagaaccgcatctgcacctgcaggcccggctggtactgcgcgctgagcaagcaggaggggtgccggctgtgcgcgccgctgcgcaagtgccgcccgggcttcggcgtggccagaccaggaactgaaacatcagacgtggtgtgcaagccctgtgccccggggacgttctccaacacgacttcatccacggatatttgcaggccccaccagatctgtaacgtggtggccatccctgggaatgcaagcatggatgcagtctgcacgtccacgtcccccacccggagtatggccccaggggcagtacacttaccccagccagtgtccacacgatcccaacacacgcagccaactccagaacccagcactgctccaagcacctccttcctgctcccaatgggccccagccccccagctgaagggagcactggcgacaccggtgagcccaaatcttctgacaaaactcacacatgcccaccgtgcccagcacctgaagccgcgggtgcaccgtcagtcttcctcttccccccaaaacccaaggacaccctcatgatctcccggacccctgaggtcacatgcgtggtggtggacgtgagccacgaagaccctgaggtcaagttcaactggtacgtggacggcgtggaggtgcataatgccaagacaaagccgcgggaggagcagtacaacagcacgtaccgtgtggtcagcgtcctcaccgtcctgcaccaggactggctgaatggcaaggcgtacgcgtgcgcggtctccaacaaagccctcccagcccccatcgagaaaaccatctccaaagccaaagggcagccccgagaaccacaggtgtacaccctgcccccatcccgggatgagctgaccaagaaccaggtcagcctgacctgcctggtcaaaggcttctatccaagcgacatcgccgtggagtgggagagcaatgggcagccggagaacaactacaagaccacgcctcccgtgctggactccgacggctccttcttcctctacagcaagctcaccgtggacaagagcaggtggcagcaggggaacgtcttctcatgctccgtgatgcatgaggctctgcacaaccactacacgcagaagagcctctccctgtctccgggtcagaggcacaacaattcttccctgaatacaagaactcagaaagcacgtcattctccgaattctgaagttcaattgttagagtctggtggcggtcttgttcagcctggtggttctttacgtctttcttgcgctgcttccggattcactttctctgagtacgatatgctttgggttcgccaagctcctggtaaaggtttggagtgggtttcttctatctggccttctggtggctttactcagtatgctgactccgttaaaggtcgcttcactatctctagagacaactctaagaatactctctacttgcagatgaacagcttaagggctgaggacacggctgtgtattactgtgcgaggaattattacgatttttggagtggtccttactactacggtatggacgtctggggccaagggaccacggtcaccgtctcaagcggtggcggcggttcggggggtggcggaagtggaggtggagggagtcaagacatccagatgacccagtctccatcctccctgtctgcatctgtaggagacagagtcaccatcacttgccgggcaagtcagagcattagcagctatttaaattggtatcagcagaaaccagggaaagcccctaagctcctgatctatgctgcatccagtttgcaaagtggggtcccatcaaggttcagtggcagtggatctgggacagatttcactctcaccatcagcagtctgcaacctgaagattttgcaacttactactgtcaacagagttacagtaccctatggacgttcggccaagggaccaaggtggaaatcaaatgagcggccgcctcgagtctagagggccctattctatagtgtcacctaaatgctagagctcg

SEQ ID NO: 683 - DNA, 2290 bp, Artificial Sequence
  Made in a lab
agcttgccgccatggattttcaagtgcagattttcagcttcctgctaatcagtgcttcagtcataatgtcgcgaggattgcccgcccaggtggcatttacaccctacgccccggagcccgggagcacatgccggctcagagaatactatgaccagacagctcagatgtgctgcagcaaatgctcgccgggccaacatgcaaaagtcttctgtaccaagacctcggacaccgtgtgtgactcctgtgaggacagcacatacacccagctctggaactgggttcccgagtgcttgagctgtggctcccgctgtagctctgaccaggtggaaactcaagcctgcactcgggaacagaaccgcatctgcacctgcaggcccggctggtactgcgcgctgagcaagcaggaggggtgccggctgtgcgcgccgctgcgcaagtgccgcccgggcttcggcgtggccagaccaggaactgaaacatcagacgtggtgtgcaagccctgtgccccggggacgttctccaacacgacttcatccacggatatttgcaggccccaccagatctgtaacgtggtggccatccctgggaatgcaagcatggatgcagtctgcacgtccacgtcccccacccggagtatggccccaggggcagtacacttaccccagccagtgtccacacgatcccaacacacgcagccaactccagaacccagcactgctccaagcacctccttcctgctcccaatgggccccagccccccagctgaagggagcactggcgacaccggtgagcccaaatcttctgacaaaactcacacatgcccaccgtgcccagcacctgaagccgcgggtgcaccgtcagtcttcctcttccccccaaaacccaaggacaccctcatgatctcccggacccctgaggtcacatgcgtggtggtggacgtgagccacgaagaccctgaggtcaagttcaactggtacgtggacggcgtggaggtgcataatgccaagacaaagccgcgggaggagcagtacaacagcacgtaccgtgtggtcagcgtcctcaccgtcctgcaccaggactggctgaatggcaaggcgtacgcgtgcgcggtctccaacaaagccctcccagcccccatcgagaaaaccatctccaaagccaaagggcagccccgagaaccacaggtgtacaccctgcccccatcccgggatgagctgaccaagaaccaggtcagcctgacctgcctggtcaaaggcttctatccaagcgacatcgccgtggagtgggagagcaatgggcagccggagaacaactacaagaccacgcctcccgtgctggactccgacggctccttcttcctctacagcaagctcaccgtggacaagagcaggtggcagcaggggaacgtcttctcatgctccgtgatgcatgaggctctgcacaaccactacacgcagaagagcctctccctgtctccgggtcagaggcacaacaattcttccctgaatacaagaactcagaaagcacgtcattctccgaattctgaagttcaattgttagagtctggtggcggtcttgttcagcctggtggttctttacgtctttcttgcgctgcttccggattcactttctctggttacgttatgggttgggttcgccaagctcctggtaaaggtttggagtgggtttcttctatctctccttctggtggctatactctttatgctgactccgttaaaggtcgcttcactatctctagagacaactctaagaatactctctacttgcagatgaacagcttaagggctgaggacacggctgtgtattactgtgcgagagcatttagcaccaggtggtactggggtgcttttgatatctggggccaagggacaatggtcaccgtctcaagcggtggcggcggttcggggggtggcggaagtggaggtggagggagtcaagacatccagatgacccagtctccagccaccctgtctttgtctccaggggaaagagccaccctctcctgcagggccagtcagagtgttaggagctacttagcctggtaccaacagaaacctggccaggctcccaggctcctcatctatgatgcatccaacagggccactggcatcccagccaggttcagtggcagtgggtctgggacagacttcactctcaccatcaccagcctgcagcctgaagatattgcaacatattactgtcaacagtatgataacctcccgctcactttcggcggagggaccaaggtggagatcaaatgagcggccgc

SEQ ID NO: 684 - DNA, 2300 bp, Artificial Sequence
  Made in a lab
aagcttgccgccatggattttcaagtgcagattttcagcttcctgctaatcagtgcttcagtcataatgtcgcgaggattgcccgcccaggtggcatttacaccctacgccccggagcccgggagcacatgccggctcagagaatactatgaccagacagctcagatgtgctgcagcaaatgctcgccgggccaacatgcaaaagtcttctgtaccaagacctcggacaccgtgtgtgactcctgtgaggacagcacatacacccagctctggaactgggttcccgagtgcttgagctgtggctcccgctgtagctctgaccaggtggaaactcaagcctgcactcgggaacagaaccgcatctgcacctgcaggcccggctggtactgcgcgctgagcaagcaggaggggtgccggctgtgcgcgccgctgcgcaagtgccgcccgggcttcggcgtggccagaccaggaactgaaacatcagacgtggtgtgcaagccctgtgccccggggacgttctccaacacgacttcatccacggatatttgcaggccccaccagatctgtaacgtggtggccatccctgggaatgcaagcatggatgcagtctgcacgtccacgtcccccacccggagtatggccccaggggcagtacacttaccccagccagtgtccacacgatcccaacacacgcagccaactccagaacccagcactgctccaagcacctccttcctgctcccaatgggccccagccccccagctgaagggagcactggcgacaccggtgagcccaaatcttctgacaaaactcacacatgcccaccgtgcccagcacctgaagccgcgggtgcaccgtcagtcttcctcttccccccaaaacccaaggacaccctcatgatctcccggacccctgaggtcacatgcgtggtggtggacgtgagccacgaagaccctgaggtcaagttcaactggtacgtggacggcgtggaggtgcataatgccaagacaaagccgcgggaggagcagtacaacagcacgtaccgtgtggtcagcgtcctcaccgtcctgcaccaggactggctgaatggcaaggcgtacgcgtgcgcggtctccaacaaagccctcccagcccccatcgagaaaaccatctccaaagccaaagggcagccccgagaaccacaggtgtacaccctgcccccatcccgggatgagctgaccaagaaccaggtcagcctgacctgcctggtcaaaggcttctatccaagcgacatcgccgtggagtgggagagcaatgggcagccggagaacaactacaagaccacgcctcccgtgctggactccgacggctccttcttcctctacagcaagctcaccgtggacaagagcaggtggcagcaggggaacgtcttctcatgctccgtgatgcatgaggctctgcacaaccactacacgcagaagagcctctccctgtctccgggtcagaggcacaacaattcttccctgaatacaagaactcagaaagcacgtcattctccgaattctgaagttcaattgttagagtctggtggcggtcttgttcagcctggtggttctttacgtctttcttgcgctgcttccggattcactttctctatttaccatatgaattgggttcgccaagctcctggtaaaggtttggagtgggtttctggtatctcttcttctggtggccgtactaattatgctgactccgttaaaggtcgcttcactatctctagagacaactctaagaatactctctacttgcagatgaacagcttaagggctgaggacacggccgtgtattactgtgcgagttcctaccgagcagctggttgggtggactactactacggtatggacgtctggggccaagggaccacggtcaccgtctcaagcggtggcggcggttcggggggtggcggaagtggaggtggagggagtcaagacatccagatgacccagtctccatcctccctgtctgcatttgtaggagacagagtcaccatcacttgccggacaagtcagagcgttgccacctatgtaaattggtatcagcagaaaccaggagaaggccctaagctcctgatctatgctgcatccagtttacaaagtggggtcccatcgaggttcagaggcagtggatctgggacagatttcactctcaccatcggcagtctgcaacctgaagattttgcaacttactactgtcaacagagttacagtgtgccaatcaccttcggccaagggacacgactggacattaaatgagcggccgc

SEQ ID NO: 685 - DNA, 2376 bp, Artificial Sequence
  Made in a lab
tggcttatcgaattaatacgactcactatagggagacccaagcttgccgccatggattttcaagtgcagattttcagcttcctgctaatcagtgcttcagtcataatgtcgcgaggattgcccgcccaggtggcatttacaccctacgccccggagcccgggagcacatgccggctcagagaatactatgaccagacagctcagatgtgctgcagcaaatgctcgccgggccaacatgcaaaagtcttctgtaccaagacctcggacaccgtgtgtgactcctgtgaggacagcacatacacccagctctggaactgggttcccgagtgcttgagctgtggctcccgctgtagctctgaccaggtggaaactcaagcctgcactcgggaacagaaccgcatctgcacctgcaggcccggctggtactgcgcgctgagcaagcaggaggggtgccggctgtgcgcgccgctgcgcaagtgccgcccgggcttcggcgtggccagaccaggaactgaaacatcagacgtggtgtgcaagccctgtgccccggggacgttctccaacacgacttcatccacggatatttgcaggccccaccagatctgtaacgtggtggccatccctgggaatgcaagcatggatgcagtctgcacgtccacgtcccccacccggagtatggccccaggggcagtacacttaccccagccagtgtccacacgatcccaacacacgcagccaactccagaacccagcactgctccaagcacctccttcctgctcccaatgggccccagccccccagctgaagggagcactggcgacaccggtgagcccaaatcttctgacaaaactcacacatgcccaccgtgcccagcacctgaagccgcgggtgcaccgtcagtcttcctcttccccccaaaacccaaggacaccctcatgatctcccggacccctgaggtcacatgcgtggtggtggacgtgagccacgaagaccctgaggtcaagttcaactggtacgtggacggcgtggaggtgcataatgccaagacaaagccgcgggaggagcagtacaacagcacgtaccgtgtggtcagcgtcctcaccgtcctgcaccaggactggctgaatggcaaggcgtacgcgtgcgcggtctccaacaaagccctcccagcccccatcgagaaaaccatctccaaagccaaagggcagccccgagaaccacaggtgtacaccctgcccccatcccgggatgagctgaccaagaaccaggtcagcctgacctgcctggtcaaaggcttctatccaagcgacatcgccgtggagtgggagagcaatgggcagccggagaacaactacaagaccacgcctcccgtgctggactccgacggctccttcttcctctacagcaagctcaccgtggacaagagcaggtggcagcaggggaacgtcttctcatgctccgtgatgcatgaggctctgcacaaccactacacgcagaagagcctctccctgtctccgggtcagaggcacaacaattcttccctgaatacaagaactcagaaagcacgtcattctccgaattctgaagttcaattgttagagtctggtggcggtcttgttcagcctggtggttctttacgtctttcttgcgctgcttccggattcactttctctctttacgatatgcattgggttcgccaagctcctggtaaaggtttggagtgggtttctcgtatctattcttctggtggcactactcagtatgctgactccgttaaaggtcgcttcactatctctagagacaactctaagaatactctctacttgcagatgaacagcttaagggctgaggacaccgccatgtattactgtgcaagagatccgggctatgggtcccaccactcctttgactactggggccagggaaccctggtcaccgtctcaagcggtggcggcggttcggggggtggcggaagtggaggtggagggagtcaagacatccagatgacccagtctccttccaccctgtctgcatctgtaggagacagagtcaccatcacttgccgggccagtcagagtatgagtaactggttggcctggtatcagcagaaaccagggaaagcccctaagctcctaatctatgatgtcttcactttgaaaagtggggtcccatcaaggttcagcggcagtagatctgggacagaattcactctcaccatcagcagcctgcagcctgatgactttgcaacttattactgccagcagtatagtgattattctgggatcactttcggccctgggaccgaagtggatatcagatgagcggccgcctcgagtctagagggccctattctatagtgtcacctaaatgctaga

SEQ ID NO: 686 - DNA, 2285 bp, Artificial Sequence
  Made in a lab
aagcttgccgccatggattttcaagtgcagattttcagcttcctgctaatcagtgcttcagtcataatgtcgcgaggattgcccgcccaggtggcatttacaccctacgccccggagcccgggagcacatgccggctcagagaatactatgaccagacagctcagatgtgctgcagcaaatgctcgccgggccaacatgcaaaagtcttctgtaccaagacctcggacaccgtgtgtgactcctgtgaggacagcacatacacccagctctggaactgggttcccgagtgcttgagctgtggctcccgctgtagctctgaccaggtggaaactcaagcctgcactcgggaacagaaccgcatctgcacctgcaggcccggctggtactgcgcgctgagcaagcaggaggggtgccggctgtgcgcgccgctgcgcaagtgccgcccgggcttcggcgtggccagaccaggaactgaaacatcagacgtggtgtgcaagccctgtgccccggggacgttctccaacacgacttcatccacggatatttgcaggccccaccagatctgtaacgtggtggccatccctgggaatgcaagcatggatgcagtctgcacgtccacgtcccccacccggagtatggccccaggggcagtacacttaccccagccagtgtccacacgatcccaacacacgcagccaactccagaacccagcactgctccaagcacctccttcctgctcccaatgggccccagccccccagctgaagggagcactggcgacaccggtgagcccaaatcttctgacaaaactcacacatgcccaccgtgcccagcacctgaagccgcgggtgcaccgtcagtcttcctcttccccccaaaacccaaggacaccctcatgatctcccggacccctgaggtcacatgcgtggtggtggacgtgagccacgaagaccctgaggtcaagttcaactggtacgtggacggcgtggaggtgcataatgccaagacaaagccgcgggaggagcagtacaacagcacgtaccgtgtggtcagcgtcctcaccgtcctgcaccaggactggctgaatggcaaggcgtacgcgtgcgcggtctccaacaaagccctcccagcccccatcgagaaaaccatctccaaagccaaagggcagccccgagaaccacaggtgtacaccctgcccccatcccgggatgagctgaccaagaaccaggtcagcctgacctgcctggtcaaaggcttctatccaagcgacatcgccgtggagtgggagagcaatgggcagccggagaacaactacaagaccacgcctcccgtgctggactccgacggctccttcttcctctacagcaagctcaccgtggacaagagcaggtggcagcaggggaacgtcttctcatgctccgtgatgcatgaggctctgcacaaccactacacgcagaagagcctctccctgtctccgggtcagaggcacaacaattcttccctgaatacaagaactcagaaagcacgtcattctccgaattctgaagttcaattgttagagtctggtggcggtcttgttcagcctggtggttctttacgtctttcttgcgctgcttccggattcactttctcttcttactatatgacttgggttcgacaagctcctggtaaaggtttggagtgggtttctggtatctattcttctggtggccctactcagtatgctgactccgttaaaggtcgcttcactatctctagagacaactctaagaatactctctacttgcagatgaacagcttaagggctgaggacacggccgtatattactgtgcgagagcggggggggatgcttttgatatctggggccaagggacaatggtcaccgtctcaagcggtggcggcggttcggggggtggcggaagtggaggtggagggagtcagagcgtcttgactcagccaccctcagcgtctgggacccccgggcagagggtcaccatctcttgttctggaagcagctccaacatcggaagtaaagttgtatactggtaccagcaggtaccaggaacggcccccaaactcctcatctataggaatgatcagcggccctcaggggtccctgaccggttctctggctccaagtctggcacctcagcctccctggccatcagtgggctccggtccgaggatgaggctgattattactgtgcagcatgggatgacagcctgagtggtcggtgggtgttcggcggagggaccaagctgaccgtcctatgagcggccgc

SEQ ID NO: 687 - DNA, 2361 bp, Artificial Sequence
  Made in a lab
ttttcgaattaatacgactcactatagggagacccaagcttgccgccatggattttcaagtgcagattttcagcttcctgctaatcagtgcttcagtcataatgtcgcgaggattgcccgcccaggtggcatttacaccctacgccccggagcccgggagcacatgccggctcagagaatactatgaccagacagctcagatgtgctgcagcaaatgctcgccgggccaacatgcaaaagtcttctgtaccaagacctcggacaccgtgtgtgactcctgtgaggacagcacatacacccagctctggaactgggttcccgagtgcttgagctgtggctcccgctgtagctctgaccaggtggaaactcaagcctgcactcgggaacagaaccgcatctgcacctgcaggcccggctggtactgcgcgctgagcaagcaggaggggtgccggctgtgcgcgccgctgcgcaagtgccgcccgggcttcggcgtggccagaccaggaactgaaacatcagacgtggtgtgcaagccctgtgccccggggacgttctccaacacgacttcatccacggatatttgcaggccccaccagatctgtaacgtggtggccatccctgggaatgcaagcatggatgcagtctgcacgtccacgtcccccacccggagtatggccccaggggcagtacacttaccccagccagtgtccacacgatcccaacacacgcagccaactccagaacccagcactgctccaagcacctccttcctgctcccaatgggccccagccccccagctgaagggagcactggcgacaccggtgagcccaaatcttctgacaaaactcacacatgcccaccgtgcccagcacctgaagccgcgggtgcaccgtcagtcttcctcttccccccaaaacccaaggacaccctcatgatctcccggacccctgaggtcacatgcgtggtggtggacgtgagccacgaagaccctgaggtcaagttcaactggtacgtggacggcgtggaggtgcataatgccaagacaaagccgcgggaggagcagtacaacagcacgtaccgtgtggtcagcgtcctcaccgtcctgcaccaggactggctgaatggcaaggcgtacgcgtgcgcggtctccaacaaagccctcccagcccccatcgagaaaaccatctccaaagccaaagggcagccccgagaaccacaggtgtacaccctgcccccatcccgggatgagctgaccaagaaccaggtcagcctgacctgcctggtcaaaggcttctatccaagcgacatcgccgtggagtgggagagcaatgggcagccggagaacaactacaagaccacgcctcccgtgctggactccgacggctccttcttcctctacagcaagctcaccgtggacaagagcaggtggcagcaggggaacgtcttctcatgctccgtgatgcatgaggctctgcacaaccactacacgcagaagagcctctccctgtctccgggtcagaggcacaacaattcttccctgaatacaagaactcagaaagcacgtcattctccgaattctgaagttcaattgttagagtctggtggcggtcttgttcagcctggtggttctttacgtctttcttgcgctgcttccggattcactttctcttcttacgagatgttttgggttcgccaagctcctggtaaaggtttggagtgggtttcttctatctctccttctggtggctatacttattatgctgactccgttaaaggtcgcttcactatctctagagacaactctaagaatactctctacttgcagatgaacagcttaagggctgaggacacggccgtgtattactgtgcgacaatgactactagtggttttcatctaatctggggccaagggacaatggtcaccgtctcaagcggtggcggcggttcggggggtggcggaagtggaggtggagggagtcaagacatccagatgacccagtctccagccaccctgtctgcatctgtaggagacagagtcaccatcacttgccgggccagtcagagtattagtagctggttggcctggtatcagcagaaaccagggaaagcccctaagctcctgatctataaggcgtctggtttagaaagtggggtcccatcaaggttcagcggcagtggatctgggacagaattcactctcaccatcagcagcctgcagcctgatgattttgcaacttattactgccaacagtataatagttatccattcactttcggccctgggactaaagtggatatcaagtgagcggccgcctcgagtctagagggccctattctatagtgtcacctaaatgctagag

SEQ ID NO: 688 - DNA, 2276 bp, Artificial Sequence
  Made in a lab
aagcttgccgccatggattttcaagtgcagattttcagcttcctgctaatcagtgcttcagtcataatgtcgcgaggattgcccgcccaggtggcatttacaccctacgccccggagcccgggagcacatgccggctcagagaatactatgaccagacagctcagatgtgctgcagcaaatgctcgccgggccaacatgcaaaagtcttctgtaccaagacctcggacaccgtgtgtgactcctgtgaggacagcacatacacccagctctggaactgggttcccgagtgcttgagctgtggctcccgctgtagctctgaccaggtggaaactcaagcctgcactcgggaacagaaccgcatctgcacctgcaggcccggctggtactgcgcgctgagcaagcaggaggggtgccggctgtgcgcgccgctgcgcaagtgccgcccgggcttcggcgtggccagaccaggaactgaaacatcagacgtggtgtgcaagccctgtgccccggggacgttctccaacacgacttcatccacggatatttgcaggccccaccagatctgtaacgtggtggccatccctgggaatgcaagcatggatgcagtctgcacgtccacgtcccccacccggagtatggccccaggggcagtacacttaccccagccagtgtccacacgatcccaacacacgcagccaactccagaacccagcactgctccaagcacctccttcctgctcccaatgggccccagccccccagctgaagggagcactggcgacaccggtgagcccaaatcttctgacaaaactcacacatgcccaccgtgcccagcacctgaagccgcgggtgcaccgtcagtcttcctcttccccccaaaacccaaggacaccctcatgatctcccggacccctgaggtcacatgcgtggtggtggacgtgagccacgaagaccctgaggtcaagttcaactggtacgtggacggcgtggaggtgcataatgccaagacaaagccgcgggaggagcagtacaacagcacgtaccgtgtggtcagcgtcctcaccgtcctgcaccaggactggctgaatggcaaggcgtacgcgtgcgcggtctccaacaaagccctcccagcccccatcgagaaaaccatctccaaagccaaagggcagccccgagaaccacaggtgtacaccctgcccccatcccgggatgagctgaccaagaaccaggtcagcctgacctgcctggtcaaaggcttctatccaagcgacatcgccgtggagtgggagagcaatgggcagccggagaacaactacaagaccacgcctcccgtgctggactccgacggctccttcttcctctacagcaagctcaccgtggacaagagcaggtggcagcaggggaacgtcttctcatgctccgtgatgcatgaggctctgcacaaccactacacgcagaagagcctctccctgtctccgggtcagaggcacaacaattcttccctgaatacaagaactcagaaagcacgtcattctccgaattctgaagttcaattgttagagtctggtggcggtcttgttcagcctggtggttctttacgtctttcttgcgctgcttccggattcactttctctgattaccctatgcagtgggttcgccaagctcctggtaaaggtttggagtgggtttcttggatcggtccttctggtggctggactgtttatgctgactccgttaaaggtcgcttcactatctctagagacaactctaagaatactctctacttgcagatgaacagcttaagggctgaggacacggccgtgtattactgtgcgagggatgacggaattgctggattcctatggggccagggcaccctggtcaccgtctcaagcggtggcggcggttcggggggtggcggaagtggaggtggagggagtcaagacatccagatgacccagtctccactctccctgtctgcatctgtaggagacagagtcaccatcacttgccaggcgagtcgagacattagtatctatttaaattggtatcagcagaaaccagggaaagttcctaagctcctgatctttggtgcgtccactttgcgatcaggggtcccatctcggttcagtggcagtggatctgggacagatttcactctcaccatcaccagcctgcagcctgaagatgttgcaacttattactgtcaaaagtataacagtgccccgtacacttttggcccggggaccaaggtcgagatcagatgagcggccgc

SEQ ID NO: 689 - DNA, 2300 bp, Artificial Sequence
  Made in a lab
aagcttgccgccatggattttcaagtgcagattttcagcttcctgctaatcagtgcttcagtcataatgtcgcgaggattgcccgcccaggtggcatttacaccctacgccccggagcccgggagcacatgccggctcagagaatactatgaccagacagctcagatgtgctgcagcaaatgctcgccgggccaacatgcaaaagtcttctgtaccaagacctcggacaccgtgtgtgactcctgtgaggacagcacatacacccagctctggaactgggttcccgagtgcttgagctgtggctcccgctgtagctctgaccaggtggaaactcaagcctgcactcgggaacagaaccgcatctgcacctgcaggcccggctggtactgcgcgctgagcaagcaggaggggtgccggctgtgcgcgccgctgcgcaagtgccgcccgggcttcggcgtggccagaccaggaactgaaacatcagacgtggtgtgcaagccctgtgccccggggacgttctccaacacgacttcatccacggatatttgcaggccccaccagatctgtaacgtggtggccatccctgggaatgcaagcatggatgcagtctgcacgtccacgtcccccacccggagtatggccccaggggcagtacacttaccccagccagtgtccacacgatcccaacacacgcagccaactccagaacccagcactgctccaagcacctccttcctgctcccaatgggccccagccccccagctgaagggagcactggcgacaccggtgagcccaaatcttctgacaaaactcacacatgcccaccgtgcccagcacctgaagccgcgggtgcaccgtcagtcttcctcttccccccaaaacccaaggacaccctcatgatctcccggacccctgaggtcacatgcgtggtggtggacgtgagccacgaagaccctgaggtcaagttcaactggtacgtggacggcgtggaggtgcataatgccaagacaaagccgcgggaggagcagtacaacagcacgtaccgtgtggtcagcgtcctcaccgtcctgcaccaggactggctgaatggcaaggcgtacgcgtgcgcggtctccaacaaagccctcccagcccccatcgagaaaaccatctccaaagccaaagggcagccccgagaaccacaggtgtacaccctgcccccatcccgggatgagctgaccaagaaccaggtcagcctgacctgcctggtcaaaggcttctatccaagcgacatcgccgtggagtgggagagcaatgggcagccggagaacaactacaagaccacgcctcccgtgctggactccgacggctccttcttcctctacagcaagctcaccgtggacaagagcaggtggcagcaggggaacgtcttctcatgctccgtgatgcatgaggctctgcacaaccactacacgcagaagagcctctccctgtctccgggtcagaggcacaacaattcttccctgaatacaagaactcagaaagcacgtcattctccgaattctgaagttcaattgttagagtctggtggcggtcttgttcagcctggtggttctttacgtctttcttgcgctgcttccggattcactttctcttggtaccttatgcattgggttcgccaagctcctggtaaaggtttggagtgggtttctggtatctggccttctggtggccatactctttatgctgactccgttaaaggtcgcttcactatctctagagacaactctaagaatactctctacttgcagatgaacagcttaagggctgaggacacggccgtgtattactgtgcgagagagccgttactatggttcggggagttatcgtacaactggttcgacccctggggccagggcaccctggtcaccgtctcaagcggtggcggcggttcggggggtggcggaagtggaggtggagggagtcaagacatccagatgacccagtctccatcttccgtgtctgcatctgtaggagacagagtcaccatcacttgtcgggcgagtcagggtattagcagctggttagcctggtatcagcagaaaccagggaaagcccctaagctcctgatctatgctgcatccagtttgcaaagtggggtcccatcaaggttcagcggcagtggatctgggacagatttcactctcaccatcagcagcctgcagcctgaagattttgcaacttactattgtcaacaggctaacagtttccctctcactttcggcggagggaccaaggtggagatcaaatgagcggccgc

SEQ ID NO: 690 - DNA, 2294 bp, Artificial Sequence
  Made in a lab
aagcttgccgccatggattttcaagtgcagattttcagcttcctgctaatcagtgcttcagtcataatgtcgcgaggattgcccgcccaggtggcatttacaccctacgccccggagcccgggagcacatgccggctcagagaatactatgaccagacagctcagatgtgctgcagcaaatgctcgccgggccaacatgcaaaagtcttctgtaccaagacctcggacaccgtgtgtgactcctgtgaggacagcacatacacccagctctggaactgggttcccgagtgcttgagctgtggctcccgctgtagctctgaccaggtggaaactcaagcctgcactcgggaacagaaccgcatctgcacctgcaggcccggctggtactgcgcgctgagcaagcaggaggggtgccggctgtgcgcgccgctgcgcaagtgccgcccgggcttcggcgtggccagaccaggaactgaaacatcagacgtggtgtgcaagccctgtgccccggggacgttctccaacacgacttcatccacggatatttgcaggccccaccagatctgtaacgtggtggccatccctgggaatgcaagcatggatgcagtctgcacgtccacgtcccccacccggagtatggccccaggggcagtacacttaccccagccagtgtccacacgatcccaacacacgcagccaactccagaacccagcactgctccaagcacctccttcctgctcccaatgggccccagccccccagctgaagggagcactggcgacaccggtgagcccaaatcttctgacaaaactcacacatgcccaccgtgcccagcacctgaagccgcgggtgcaccgtcagtcttcctcttccccccaaaacccaaggacaccctcatgatctcccggacccctgaggtcacatgcgtggtggtggacgtgagccacgaagaccctgaggtcaagttcaactggtacgtggacggcgtggaggtgcataatgccaagacaaagccgcgggaggagcagtacaacagcacgtaccgtgtggtcagcgtcctcaccgtcctgcaccaggactggctgaatggcaaggcgtacgcgtgcgcggtctccaacaaagccctcccagcccccatcgagaaaaccatctccaaagccaaagggcagccccgagaaccacaggtgtacaccctgcccccatcccgggatgagctgaccaagaaccaggtcagcctgacctgcctggtcaaaggcttctatccaagcgacatcgccgtggagtgggagagcaatgggcagccggagaacaactacaagaccacgcctcccgtgctggactccgacggctccttcttcctctacagcaagctcaccgtggacaagagcaggtggcagcaggggaacgtcttctcatgctccgtgatgcatgaggctctgcacaaccactacacgcagaagagcctctccctgtctccgggtcagaggcacaacaattcttccctgaatacaagaactcagaaagcacgtcattctccgaattctgaagttcaattgttagagtctggtggcggtcttgttcagcctggtggttctttacgtctttcttgcgctgcttccggattcactttctcttattacgagaatatggcttgggttcgccaagctcctggtaaaggtttggagtgggtttctggtatctatccttctggtggccttacttattatgctgactccgttaaaggtcgcttcactatctctagagacaactctaagaatactctctacttgcagatgaacagcttaagggctgaggacacggccgtgtattactgtgcgagatccaggaggtactatgatagtagtgatgcttttgatatctggggccaagggacaatggtcaccgtctcaagcggtggcggcggttcggggggtggcggaagtggaggtggagggagtcaagacatccagatgacccagtctccagccaccctgtctttgtctccaggggaaagagccaccctctcctgcagggccagtcagagtattaacacctacttagcctggtatcagcagaagcctggccaccctcccaggctcctcatttatgatgcatccaacagggccactggcatcccagacaggttcagtggcagtgggtctgggacagacttcactctcaccatcagcagactggagcctgaagattttgtagtgtattactgtcagcagtatggtaggtcacggtacacttttggccaggggaccaagctggagatcaaatgagcggccgc

SEQ ID NO: 691 - DNA, 2294 bp, Artificial Sequence
  Made in a lab
aagcttgccgccatggattttcaagtgcagattttcagcttcctgctaatcagtgcttcagtcataatgtcgcgaggattgcccgcccaggtggcatttacaccctacgccccggagcccgggagcacatgccggctcagagaatactatgaccagacagctcagatgtgctgcagcaaatgctcgccgggccaacatgcaaaagtcttctgtaccaagacctcggacaccgtgtgtgactcctgtgaggacagcacatacacccagctctggaactgggttcccgagtgcttgagctgtggctcccgctgtagctctgaccaggtggaaactcaagcctgcactcgggaacagaaccgcatctgcacctgcaggcccggctggtactgcgcgctgagcaagcaggaggggtgccggctgtgcgcgccgctgcgcaagtgccgcccgggcttcggcgtggccagaccaggaactgaaacatcagacgtggtgtgcaagccctgtgccccggggacgttctccaacacgacttcatccacggatatttgcaggccccaccagatctgtaacgtggtggccatccctgggaatgcaagcatggatgcagtctgcacgtccacgtcccccacccggagtatggccccaggggcagtacacttaccccagccagtgtccacacgatcccaacacacgcagccaactccagaacccagcactgctccaagcacctccttcctgctcccaatgggccccagccccccagctgaagggagcactggcgacaccggtgagcccaaatcttctgacaaaactcacacatgcccaccgtgcccagcacctgaagccgcgggtgcaccgtcagtcttcctcttccccccaaaacccaaggacaccctcatgatctcccggacccctgaggtcacatgcgtggtggtggacgtgagccacgaagaccctgaggtcaagttcaactggtacgtggacggcgtggaggtgcataatgccaagacaaagccgcgggaggagcagtacaacagcacgtaccgtgtggtcagcgtcctcaccgtcctgcaccaggactggctgaatggcaaggcgtacgcgtgcgcggtctccaacaaagccctcccagcccccatcgagaaaaccatctccaaagccaaagggcagccccgagaaccacaggtgtacaccctgcccccatcccgggatgagctgaccaagaaccaggtcagcctgacctgcctggtcaaaggcttctatccaagcgacatcgccgtggagtgggagagcaatgggcagccggagaacaactacaagaccacgcctcccgtgctggactccgacggctccttcttcctctacagcaagctcaccgtggacaagagcaggtggcagcaggggaacgtcttctcatgctccgtgatgcatgaggctctgcacaaccactacacgcagaagagcctctccctgtctccgggtcagaggcacaacaattcttccctgaatacaagaactcagaaagcacgtcattctccgaattctgaagttcaattgttagagtctggtggcggtcttgttcagcctggtggttctttacgtctttcttgcgctgcttccggattcactttctctacttacgttatgtattgggttcgccaagctcctggtaaaggtttggagtgggtttctggtatcggtccttctggtggcaatactttttatgctgactccgttaaaggtcgcttcactatctctagagacaactctaagaatactctctacttgcagatgaacagcttaagggctgaggacacggccgtgtgttactgtgcgagagacccaggggatttttggagtggttactacggtatggacgtctggggccaagggaccacggtcaccgtctcaagcggtggcggcggttcggggggtggcggaagtggaggtggagggagtcaagacatccagatgacccagtctccatcctccctgtctgcatctgtaggagacagagtcaccatcacttgccgggcgagtcagggcattagcaattatttagcctggtatcagcagaaaccagggaaagttcctaagctcctgatcaatgctgcatccactttgcaatcaggggtcccatctcggttcagtggcagtggatctgggacagaattcactctcaccatcagcagtctgcaacctgaagattttgcaacttactactgtcaacagagtgacaatattccgtacacttttggcctggggaccaaactggagatcaaatgagcggccgc

SEQ ID NO: 692 - DNA, 2297 bp, Artificial Sequence
  Made in a lab
aagcttgccgccatggattttcaagtgcagattttcagcttcctgctaatcagtgcttcagtcataatgtcgcgaggattgcccgcccaggtggcatttacaccctacgccccggagcccgggagcacatgccggctcagagaatactatgaccagacagctcagatgtgctgcagcaaatgctcgccgggccaacatgcaaaagtcttctgtaccaagacctcggacaccgtgtgtgactcctgtgaggacagcacatacacccagctctggaactgggttcccgagtgcttgagctgtggctcccgctgtagctctgaccaggtggaaactcaagcctgcactcgggaacagaaccgcatctgcacctgcaggcccggctggtactgcgcgctgagcaagcaggaggggtgccggctgtgcgcgccgctgcgcaagtgccgcccgggcttcggcgtggccagaccaggaactgaaacatcagacgtggtgtgcaagccctgtgccccggggacgttctccaacacgacttcatccacggatatttgcaggccccaccagatctgtaacgtggtggccatccctgggaatgcaagcatggatgcagtctgcacgtccacgtcccccacccggagtatggccccaggggcagtacacttaccccagccagtgtccacacgatcccaacacacgcagccaactccagaacccagcactgctccaagcacctccttcctgctcccaatgggccccagccccccagctgaagggagcactggcgacaccggtgagcccaaatcttctgacaaaactcacacatgcccaccgtgcccagcacctgaagccgcgggtgcaccgtcagtcttcctcttccccccaaaacccaaggacaccctcatgatctcccggacccctgaggtcacatgcgtggtggtggacgtgagccacgaagaccctgaggtcaagttcaactggtacgtggacggcgtggaggtgcataatgccaagacaaagccgcgggaggagcagtacaacagcacgtaccgtgtggtcagcgtcctcaccgtcctgcaccaggactggctgaatggcaaggcgtacgcgtgcgcggtctccaacaaagccctcccagcccccatcgagaaaaccatctccaaagccaaagggcagccccgagaaccacaggtgtacaccctgcccccatcccgggatgagctgaccaagaaccaggtcagcctgacctgcctggtcaaaggcttctatccaagcgacatcgccgtggagtgggagagcaatgggcagccggagaacaactacaagaccacgcctcccgtgctggactccgacggctccttcttcctctacagcaagctcaccgtggacaagagcaggtggcagcaggggaacgtcttctcatgctccgtgatgcatgaggctctgcacaaccactacacgcagaagagcctctccctgtctccgggtcagaggcacaacaattcttccctgaatacaagaactcagaaagcacgtcattctccgaattctgaagttcaattgttagagtctggtggcggtcttgttcagcctggtggttctttacgtctttcttgcgctgcttccggattcactttctctttttacggtatggcttgggttcgccaagctcctggtaaaggtttggagtgggtttcttctatctatccttctggtggctatactgattatgctgactccgttaaaggtcgcttcactatctctagagacaactctaagaatactctctacttgcagatgaacagcttaagggctgaggacacggccgtgtattactgtgcgagatccgcgggaggctggatcggggggggtgcttttgatatctggggccaagggacaatggtcaccgtctcaagcggtggcggcggttcggggggtggcggaagtggaggtggagggagtcagagcgaattgactcagccaccctcagcgtctgggacccccgggcagagggtcaccatctcttgttctggaagcagctccaacatcggaagtaatactgtaaactggtaccagcagctcccaggaacggcccccaaactcctcatctatagtaataatcagcggccctcaggggtccctgaccgattctctggctccaagtctggcacctcagcctccctggccatcagtgggctccagtctgaggatgaggctgattattactgtgcagcatgggatgacagcctgaatggttatgtcttcggaattgggaccaaggtcaccgtcctatgagcggccgc

SEQ ID NO: 693 - DNA, 2303 bp, Artificial Sequence
  Made in a lab
aagcttgccgccatggattttcaagtgcagattttcagcttcctgctaatcagtgcttcagtcataatgtcgcgaggattgcccgcccaggtggcatttacaccctacgccccggagcccgggagcacatgccggctcagagaatactatgaccagacagctcagatgtgctgcagcaaatgctcgccgggccaacatgcaaaagtcttctgtaccaagacctcggacaccgtgtgtgactcctgtgaggacagcacatacacccagctctggaactgggttcccgagtgcttgagctgtggctcccgctgtagctctgaccaggtggaaactcaagcctgcactcgggaacagaaccgcatctgcacctgcaggcccggctggtactgcgcgctgagcaagcaggaggggtgccggctgtgcgcgccgctgcgcaagtgccgcccgggcttcggcgtggccagaccaggaactgaaacatcagacgtggtgtgcaagccctgtgccccggggacgttctccaacacgacttcatccacggatatttgcaggccccaccagatctgtaacgtggtggccatccctgggaatgcaagcatggatgcagtctgcacgtccacgtcccccacccggagtatggccccaggggcagtacacttaccccagccagtgtccacacgatcccaacacacgcagccaactccagaacccagcactgctccaagcacctccttcctgctcccaatgggccccagccccccagctgaagggagcactggcgacaccggtgagcccaaatcttctgacaaaactcacacatgcccaccgtgcccagcacctgaagccgcgggtgcaccgtcagtcttcctcttccccccaaaacccaaggacaccctcatgatctcccggacccctgaggtcacatgcgtggtggtggacgtgagccacgaagaccctgaggtcaagttcaactggtacgtggacggcgtggaggtgcataatgccaagacaaagccgcgggaggagcagtacaacagcacgtaccgtgtggtcagcgtcctcaccgtcctgcaccaggactggctgaatggcaaggcgtacgcgtgcgcggtctccaacaaagccctcccagcccccatcgagaaaaccatctccaaagccaaagggcagccccgagaaccacaggtgtacaccctgcccccatcccgggatgagctgaccaagaaccaggtcagcctgacctgcctggtcaaaggcttctatccaagcgacatcgccgtggagtgggagagcaatgggcagccggagaacaactacaagaccacgcctcccgtgctggactccgacggctccttcttcctctacagcaagctcaccgtggacaagagcaggtggcagcaggggaacgtcttctcatgctccgtgatgcatgaggctctgcacaaccactacacgcagaagagcctctccctgtctccgggtcagaggcacaacaattcttccctgaatacaagaactcagaaagcacgtcattctccgaattctgaagttcaattgttagagtctggtggcggtcttgttcagcctggtggttctttacgtctttcttgcgctgcttccggattcactttctctaagtaccctatgatgtgggttcgccaagctcctggtaaaggtttggagtgggtttcttatatctatccttctggtggcaagactgcttatgctgactccgttaaaggtcgcttcactatctctagagacaactctaagaatactctctacttgcagatgaacagcttaagggctgaggacacggccgtgtattactgtgccacctatggttcagggagttattacctttactactactactactacatggacgtctggggcaaagggaccacggtcaccgtctcaagcggtggcggcggttcggggggtggcggaagtggaggtggagggagtcaagacatccagatgacccagtctccatcctccctgtctgcatctgtgggagacagtgtcaccatcgcttgccgggctagtcagagcattagcacctatttaaattggtatcagcagaaaccagggcaagcccctaagctcctgatctatgaagcaaccaatttgcaaagtggggtcccatcaaggttcagcggcagtggatctgggacagatttcactctcaccatcagcagcctgcagcctgaagatgttgcaacttactactgtcagcaggctaacaatttcccattcactttcggccctgggaccaaagtggatatcaaatgagcggccgc

SEQ ID NO: 694 - DNA, 2306 bp, Artificial Sequence
  Made in a lab
aagcttgccgccatggattttcaagtgcagattttcagcttcctgctaatcagtgcttcagtcataatgtcgcgaggattgcccgcccaggtggcatttacaccctacgccccggagcccgggagcacatgccggctcagagaatactatgaccagacagctcagatgtgctgcagcaaatgctcgccgggccaacatgcaaaagtcttctgtaccaagacctcggacaccgtgtgtgactcctgtgaggacagcacatacacccagctctggaactgggttcccgagtgcttgagctgtggctcccgctgtagctctgaccaggtggaaactcaagcctgcactcgggaacagaaccgcatctgcacctgcaggcccggctggtactgcgcgctgagcaagcaggaggggtgccggctgtgcgcgccgctgcgcaagtgccgcccgggcttcggcgtggccagaccaggaactgaaacatcagacgtggtgtgcaagccctgtgccccggggacgttctccaacacgacttcatccacggatatttgcaggccccaccagatctgtaacgtggtggccatccctgggaatgcaagcatggatgcagtctgcacgtccacgtcccccacccggagtatggccccaggggcagtacacttaccccagccagtgtccacacgatcccaacacacgcagccaactccagaacccagcactgctccaagcacctccttcctgctcccaatgggccccagccccccagctgaagggagcactggcgacaccggtgagcccaaatcttctgacaaaactcacacatgcccaccgtgcccagcacctgaagccgcgggtgcaccgtcagtcttcctcttccccccaaaacccaaggacaccctcatgatctcccggacccctgaggtcacatgcgtggtggtggacgtgagccacgaagaccctgaggtcaagttcaactggtacgtggacggcgtggaggtgcataatgccaagacaaagccgcgggaggagcagtacaacagcacgtaccgtgtggtcagcgtcctcaccgtcctgcaccaggactggctgaatggcaaggcgtacgcgtgcgcggtctccaacaaagccctcccagcccccatcgagaaaaccatctccaaagccaaagggcagccccgagaaccacaggtgtacaccctgcccccatcccgggatgagctgaccaagaaccaggtcagcctgacctgcctggtcaaaggcttctatccaagcgacatcgccgtggagtgggagagcaatgggcagccggagaacaactacaagaccacgcctcccgtgctggactccgacggctccttcttcctctacagcaagctcaccgtggacaagagcaggtggcagcaggggaacgtcttctcatgctccgtgatgcatgaggctctgcacaaccactacacgcagaagagcctctccctgtctccgggtcagaggcacaacaattcttccctgaatacaagaactcagaaagcacgtcattctccgaattctgaagttcaattgttagagtctggtggcggtcttgttcagcctggtggttctttacgtctttcttgcgctgcttccggattcactttctcttggtactctatgtggtgggttcgccaagctcctggtaaaggtttggagtgggtttcttatatcgttccttctggtggcgagactatttatgctgactccgttaaaggtcgcttcactatctctagagacaactctaagaatactctctacttgcagatgaacagcttaagggctgaggacacggccgtgtattactgtgcgaaaaaccttggtgaaggattttggagtgattattaccctccgcttgactactggggccagggaaccctggtcaccgtctcaagcggtggcggcggttcggggggtggcggaagtggaggtggagggagtcagagcgtcttgactcagccaccctcagcgtctgggacccccgggcagagggtcaccatctcttgttctggaagcagctccaacatcggaggtaatgctgtaaactggtaccagcagctcccgggaacggcccccaaactcgtcctctatagtagtaatcaccggccctcaggggtccctgaccgattctctggctccaggtctggcacctcagcctccctggccatcagtgggctccagtctcaggatgaggctgattactactgtgcagcatgggatgacagcctgaatggtccgctcttcggcggagggaccaagytgaccgtcctatgagcggccgc

SEQ ID NO: 695 - DNA, 2279 bp, Artificial Sequence
  Made in a lab
aagcttgccgccatggattttcaagtgcagattttcagcttcctgctaatcagtgcttcagtcataatgtcgcgaggattgcccgcccaggtggcatttacaccctacgccccggagcccgggagcacatgccggctcagagaatactatgaccagacagctcagatgtgctgcagcaaatgctcgccgggccaacatgcaaaagtcttctgtaccaagacctcggacaccgtgtgtgactcctgtgaggacagcacatacacccagctctggaactgggttcccgagtgcttgagctgtggctcccgctgtagctctgaccaggtggaaactcaagcctgcactcgggaacagaaccgcatctgcacctgcaggcccggctggtactgcgcgctgagcaagcaggaggggtgccggctgtgcgcgccgctgcgcaagtgccgcccgggcttcggcgtggccagaccaggaactgaaacatcagacgtggtgtgcaagccctgtgccccggggacgttctccaacacgacttcatccacggatatttgcaggccccaccagatctgtaacgtggtggccatccctgggaatgcaagcatggatgcagtctgcacgtccacgtcccccacccggagtatggccccaggggcagtacacttaccccagccagtgtccacacgatcccaacacacgcagccaactccagaacccagcactgctccaagcacctccttcctgctcccaatgggccccagccccccagctgaagggagcactggcgacaccggtgagcccaaatcttctgacaaaactcacacatgcccaccgtgcccagcacctgaagccgcgggtgcaccgtcagtcttcctcttccccccaaaacccaaggacaccctcatgatctcccggacccctgaggtcacatgcgtggtggtggacgtgagccacgaagaccctgaggtcaagttcaactggtacgtggacggcgtggaggtgcataatgccaagacaaagccgcgggaggagcagtacaacagcacgtaccgtgtggtcagcgtcctcaccgtcctgcaccaggactggctgaatggcaaggcgtacgcgtgcgcggtctccaacaaagccctcccagcccccatcgagaaaaccatctccaaagccaaagggcagccccgagaaccacaggtgtacaccctgcccccatcccgggatgagctgaccaagaaccaggtcagcctgacctgcctggtcaaaggcttctatccaagcgacatcgccgtggagtgggagagcaatgggcagccggagaacaactacaagaccacgcctcccgtgctggactccgacggctccttcttcctctacagcaagctcaccgtggacaagagcaggtggcagcaggggaacgtcttctcatgctccgtgatgcatgaggctctgcacaaccactacacgcagaagagcctctccctgtctccgggtcagaggcacaacaattcttccctgaatacaagaactcagaaagcacgtcattctccgaattctgaagttcaattgttagagtctggtggcggtcttgttcagcctggtggttctttacgtctttcttgcgctgcttccggattcactttctctcattacggtatgcattgggttcgccaagctcctggtaaaggtttggagtgggtttcttctatctatcctggcatgactcagtatgctgactccgttaaaggtcgcttcactatctctagagacaactctaagaatactctctacttgcagatgaacagcttaagggctgaggacacggccgtgtattactgtgcgagagatcggggttcggggattgatgcttttgatatctggggccaagggacaatggtcaccgtctcaagcggtggcggcggttcggggggtggcggaagtggaggtggagggagtcagagcgaattgactcagccaccctcagtgtccgtgtccccaggacagacggccaccgtcagctgctctggagaaaaattgggggatagatatgcctggtggtatcaacagaaggcaggccagtcccctgtgctggtcatctatcaagataccaagcggccctcaggggtccctgaccgattctctggctccaactctggcacctcagcctccctggtcatcagtggaccccagtctgaggatgaggctgattattactgtgcagcatgggatgacagcctgaagggtgtggtattcggcggagggtccaagctgaccgtcctatgagcggccgc

SEQ ID NO: 696 - DNA, 2306 bp, Artificial Sequence
  Made in a lab
aagcttgccgccatggattttcaagtgcagattttcagcttcctgctaatcagtgcttcagtcataatgtcgcgaggattgcccgcccaggtggcatttacaccctacgccccggagcccgggagcacatgccggctcagagaatactatgaccagacagctcagatgtgctgcagcaaatgctcgccgggccaacatgcaaaagtcttctgtaccaagacctcggacaccgtgtgtgactcctgtgaggacagcacatacacccagctctggaactgggttcccgagtgcttgagctgtggctcccgctgtagctctgaccaggtggaaactcaagcctgcactcgggaacagaaccgcatctgcacctgcaggcccggctggtactgcgcgctgagcaagcaggaggggtgccggctgtgcgcgccgctgcgcaagtgccgcccgggcttcggcgtggccagaccaggaactgaaacatcagacgtggtgtgcaagccctgtgccccggggacgttctccaacacgacttcatccacggatatttgcaggccccaccagatctgtaacgtggtggccatccctgggaatgcaagcatggatgcagtctgcacgtccacgtcccccacccggagtatggccccaggggcagtacacttaccccagccagtgtccacacgatcccaacacacgcagccaactccagaacccagcactgctccaagcacctccttcctgctcccaatgggccccagccccccagctgaagggagcactggcgacaccggtgagcccaaatcttctgacaaaactcacacatgcccaccgtgcccagcacctgaagccgcgggtgcaccgtcagtcttcctcttccccccaaaacccaaggacaccctcatgatctcccggacccctgaggtcacatgcgtggtggtggacgtgagccacgaagaccctgaggtcaagttcaactggtacgtggacggcgtggaggtgcataatgccaagacaaagccgcgggaggagcagtacaacagcacgtaccgtgtggtcagcgtcctcaccgtcctgcaccaggactggctgaatggcaaggcgtacgcgtgcgcggtctccaacaaagccctcccagcccccatcgagaaaaccatctccaaagccaaagggcagccccgagaaccacaggtgtacaccctgcccccatcccgggatgagctgaccaagaaccaggtcagcctgacctgcctggtcaaaggcttctatccaagcgacatcgccgtggagtgggagagcaatgggcagccggagaacaactacaagaccacgcctcccgtgctggactccgacggctccttcttcctctacagcaagctcaccgtggacaagagcaggtggcagcaggggaacgtcttctcatgctccgtgatgcatgaggctctgcacaaccactacacgcagaagagcctctccctgtctccgggtcagaggcacaacaattcttccctgaatacaagaactcagaaagcacgtcattctccgaattctgaagttcaattgttagagtctggtggcggtcttgttcagcctggtggttctttacgtctttcctgcgctgcttccggattcactttctcttggtacgatatgctttgggttcgccaagctcctggtaaaggtttggagtgggtttctgttatctccccttctggtggccgtactttttatgctgactccgttaaaggtcgcttcactatctctagagacaactctaagaatactctctacttgcagatgaacagcttaagggctgaggacacggccgtgtattactgtgcggttactcgatcgatgtatagcagcagctggtacggggcccccccgactcactggggccagggcaccctggtcaccgtctcaagcggtggcggcggttcggggggtggcggaagtggaggtggagggagtcagagcgaattgactcagccaccctcagcgtctgggacccccgggcagagggtcaccatctcttgttctggaaggagctccaacatcggaagtaatagtgtaaactggtaccagcagctcccaggaacggcccccaaactcctcatctatagtaataatcaccggccctcaggggtccctgaccgattctctggctccaagtctggcacctcagcctccctggccatcagtgggctccagtctgaggatgaggctgattattactgtgcagcatgggatgacagcctgtatcaaggagtgttcggcggagggaccaagctgaccgtcctatgagcggccgc

SEQ ID NO: 697 - DNA, 2371 bp, Artificial Sequence
  Made in a lab
tggcttatcgaattaatacgactcactatagggagacccaagcttgccgccatggattttcaagtgcagattttcagcttcctgctaatcagtgcttcagtcataatgtcgcgaggattgcccgcccaggtggcatttacaccctacgccccggagcccgggagcacatgccggctcagagaatactatgaccagacagctcagatgtgctgcagcaaatgctcgccgggccaacatgcaaaagtcttctgtaccaagacctcggacaccgtgtgtgactcctgtgaggacagcacatacacccagctctggaactgggttcccgagtgcttgagctgtggctcccgctgtagctctgaccaggtggaaactcaagcctgcactcgggaacagaaccgcatctgcacctgcaggcccggctggtactgcgcgctgagcaagcaggaggggtgccggctgtgcgcgccgctgcgcaagtgccgcccgggcttcggcgtggccagaccaggaactgaaacatcagacgtggtgtgcaagccctgtgccccggggacgttctccaacacgacttcatccacggatatttgcaggccccaccagatctgtaacgtggtggccatccctgggaatgcaagcatggatgcagtctgcacgtccacgtcccccacccggagtatggccccaggggcagtacacttaccccagccagtgtccacacgatcccaacacacgcagccaactccagaacccagcactgctccaagcacctccttcctgctcccaatgggccccagccccccagctgaagggagcactggcgacaccggtgagcccaaatcttctgacaaaactcacacatgcccaccgtgcccagcacctgaagccgcgggtgcaccgtcagtcttcctcttccccccaaaacccaaggacaccctcatgatctcccggacccctgaggtcacatgcgtggtggtggacgtgagccacgaagaccctgaggtcaagttcaactggtacgtggacggcgtggaggtgcataatgccaagacaaagccgcgggaggagcagtacaacagcacgtaccgtgtggtcagcgtcctcaccgtcctgcaccaggactggctgaatggcaaggcgtacgcgtgcgcggtctccaacaaagccctcccagcccccatcgagaaaaccatctccaaagccaaagggcagccccgagaaccacaggtgtacaccctgcccccatcccgggatgagctgaccaagaaccaggtcagcctgacctgcctggtcaaaggcttctatccaagcgacatcgccgtggagtgggagagcaatgggcagccggagaacaactacaagaccacgcctcccgtgctggactccgacggctccttcttcctctacagcaagctcaccgtggacaagagcaggtggcagcaggggaacgtcttctcatgctccgtgatgcatgaggctctgcacaaccactacacgcagaagagcctctccctgtctccgggtcagaggcacaacaattcttccctgaatacaagaactcagaaagcacgtcattctccgaattctgaagttcaattgttagagtctggtggcggtcttgttcagcctggtggttctttacgtctttcttgcgctgcttccggattcactttctcttggtacaagatgcattgggttcgccaagctcctggtaaaggtttggagtgggtttctggtatctcttcttctggtggccttactaagtatgctgactccgttaaaggtcgcttcactatctctagagacaactctaagaatactctctacttgcagatgaacagcttaagggctgaggacacagccgtgtattactgtaccacagagcggcgcggtgacgggggtgcttttgatatctggggccaagggacaatggtcaccgtctcaagcggtggcggcggttcggggggtggcggaagtggaggtggagggagtcaagacatccagatgacccagtctccatcctccctgtctgcatctgtaggagacagagtcaccatcacttgccgggcaagtcagagcattagcagctatttaaattggtatcagcagaaaccagggaaagcccctaagctcctgatctatgctgcatccagtttgcaaagtggggtcccatcaaaattcagcggcagtggatctgggacagatttcactctcaccatcagcagcctgctgcctgaagattttgcaacttattactgccaacagtatgagtatttccctccgacgttcggccaagggaccaaggtggaaatcaaatgagcggccgcctcgagtctagagggccctattctatagtgtcacctaaatgctagag

SEQ ID NO: 698 - DNA, 2294 bp, Artificial Sequence
  Made in a lab
aagcttgccgccatggattttcaagtgcagattttcagcttcctgctaatcagtgcttcagtcataatgtcgcgaggattgcccgcccaggtggcatttacaccctacgccccggagcccgggagcacatgccggctcagagaatactatgaccagacagctcagatgtgctgcagcaaatgctcgccgggccaacatgcaaaagtcttctgtaccaagacctcggacaccgtgtgtgactcctgtgaggacagcacatacacccagctctggaactgggttcccgagtgcttgagctgtggctcccgctgtagctctgaccaggtggaaactcaagcctgcactcgggaacagaaccgcatctgcacctgcaggcccggctggtactgcgcgctgagcaagcaggaggggtgccggctgtgcgcgccgctgcgcaagtgccgcccgggcttcggcgtggccagaccaggaactgaaacatcagacgtggtgtgcaagccctgtgccccggggacgttctccaacacgacttcatccacggatatttgcaggccccaccagatctgtaacgtggtggccatccctgggaatgcaagcatggatgcagtctgcacgtccacgtcccccacccggagtatggccccaggggcagtacacttaccccagccagtgtccacacgatcccaacacacgcagccaactccagaacccagcactgctccaagcacctccttcctgctcccaatgggccccagccccccagctgaagggagcactggcgacaccggtgagcccaaatcttctgacaaaactcacacatgcccaccgtgcccagcacctgaagccgcgggtgcaccgtcagtcttcctcttccccccaaaacccaaggacaccctcatgatctcccggacccctgaggtcacatgcgtggtggtggacgtgagccacgaagaccctgaggtcaagttcaactggtacgtggacggcgtggaggtgcataatgccaagacaaagccgcgggaggagcagtacaacagcacgtaccgtgtggtcagcgtcctcaccgtcctgcaccaggactggctgaatggcaaggcgtacgcgtgcgcggtctccaacaaagccctcccagcccccatcgagaaaaccatctccaaagccaaagggcagccccgagaaccacaggtgtacaccctgcccccatcccgggatgagctgaccaagaaccaggtcagcctgacctgcctggtcaaaggcttctatccaagcgacatcgccgtggagtgggagagcaatgggcagccggagaacaactacaagaccacgcctcccgtgctggactccgacggctccttcttcctctacagcaagctcaccgtggacaagagcaggtggcagcaggggaacgtcttctcatgctccgtgatgcatgaggctctgcacaaccactacacgcagaagagcctctccctgtctccgggtcagaggcacaacaattcttccctgaatacaagaactcagaaagcacgtcattctccgaattctgaagttcaattgttagagtctggtggcggtcttgttcagcctggtggttctttacgtctttcttgcgctgcttccggattcactttctctgagtacactatgtattgggttcgccaagctcctggtaaaggtttggagtgggtttcttatatctctccttctggtggcactactaattatgctggctccgttaaaggtcgcttcactatctctagagacaactctaagaatactctctacttgcagatgaacagcttaagggctgaggacacggccgtgtattactgtgcgaaaggagcttggggtgacatctactactacggtatggacgtctggggccaagggaccacggtcaccgtctcaagcggtggcggcggttcggggggtggcggaagtggaggtggagggagtcaagacatccagatgacccagtctccagactccctgtctttgtctccaggggaaagagccaccctctcctgcagggccagtcagagtgtcagcagcagctactcagcctggtaccagcagaaacctggccaggctcccaggctcctcatctatggtgcatccagcagggccactggcatcccagacaggttcagtggcagtgggtctgggacagacttcactctcaccatcagcagactggagcctgaagattttgcagtgtattactgtcagcagtatggtagctcatcgctcactttcggcggagggaccgaggtggagatcaaatgagcggccgc

SEQ ID NO: 699 - DNA, 2359 bp, Artificial Sequence
  Made in a lab
ggcttatcgaattaatacgactcactatagggagacccaagcttgccgccatggattttcaagtgcagattttcagcttcctgctaatcagtgcttcagtcataatgtcgcgaggattgcccgcccaggtggcatttacaccctacgccccggagcccgggagcacatgccggctcagagaatactatgaccagacagctcagatgtgctgcagcaaatgctcgccgggccaacatgcaaaagtcttctgtaccaagacctcggacaccgtgtgtgactcctgtgaggacagcacatacacccagctctggaactgggttcccgagtgcttgagctgtggctcccgctgtagctctgaccaggtggaaactcaagcctgcactcgggaacagaaccgcatctgcacctgcaggcccggctggtactgcgcgctgagcaagcaggaggggtgccggctgtgcgcgccgctgcgcaagtgccgcccgggcttcggcgtggccagaccaggaactgaaacatcagacgtggtgtgcaagccctgtgccccggggacgttctccaacacgacttcatccacggatatttgcaggccccaccagatctgtaacgtggtggccatccctgggaatgcaagcatggatgcagtctgcacgtccacgtcccccacccggagtatggccccaggggcagtacacttaccccagccagtgtccacacgatcccaacacacgcagccaactccagaacccagcactgctccaagcacctccttcctgctcccaatgggccccagccccccagctgaagggagcactggcgacaccggtgagcccaaatcttctgacaaaactcacacatgcccaccgtgcccagcacctgaagccgcgggtgcaccgtcagtcttcctcttccccccaaaacccaaggacaccctcatgatctcccggacccctgaggtcacatgcgtggtggtggacgtgagccacgaagaccctgaggtcaagttcaactggtacgtggacggcgtggaggtgcataatgccaagacaaagccgcgggaggagcagtacaacagcacgtaccgtgtggtcagcgtcctcaccgtcctgcaccaggactggctgaatggcaaggcgtacgcgtgcgcggtctccaacaaagccctcccagcccccatcgagaaaaccatctccaaagccaaagggcagccccgagaaccacaggtgtacaccctgcccccatcccgggatgagctgaccaagaaccaggtcagcctgacctgcctggtcaaaggcttctatccaagcgacatcgccgtggagtgggagagcaatgggcagccggagaacaactacaagaccacgcctcccgtgctggactccgacggctccttcttcctctacagcaagctcaccgtggacaagagcaggtggcagcaggggaacgtcttctcatgctccgtgatgcatgaggctctgcacaaccactacacgcagaagagcctctccctgtctccgggtcagaggcacaacaattcttccctgaatacaagaactcagaaagcacgtcattctccgaattctgaagttcaattgttagagtctggtggcggtcttgttcagcctggtggttctttacgtctttcttgcgctgcttccggattcactttctcttcttactggatgcattgggttcgccaagctcctggtaaaggtttggagtgggtttcttctatctatccttctggtggctctactgagtatgctgactccgttaaaggtcgcttcactatctctagagacaactctaagaatactctctacttgcagatgaacagcttaagggctgaggacacggccgtgtattactgtgcgaaaggaatctggttcgacccctggggccagggaaccctggtcaccgtctcaagcggtggcggcggttcggggggtggcggaagtggaggtggagggagtcaagacatccagatgacccagtctccagccaccctgtctgcctctgtaggagacagggtcaccatcacttgccggtcaagtcagaggattagcggctatttaaattggtatcagcagcaaccagggaaagcccctaagctcctgatctatgctgcatccaccttacaaagtggggtcccatcaaggatcagtggcagtggatctgggacagatttcagtctcatcatcagcagtctgcaacctgaagatgttgcaacttattattgtcaacagagttacagtcccccgttcacttttggccaagggaccaaggtggaaatcaaatgagcggccgcctcgagtctagagggccctattctatagtgtcacctaaatgctagagctcg

SEQ ID NO: 700 - DNA, 2288 bp, Artificial Sequence
  Made in a lab
aagcttgccgccatggattttcaagtgcagattttcagcttcctgctaatcagtgcttcagtcataatgtcgcgaggattgcccgcccaggtggcatttacaccctacgccccggagcccgggagcacatgccggctcagagaatactatgaccagacagctcagatgtgctgcagcaaatgctcgccgggccaacatgcaaaagtcttctgtaccaagacctcggacaccgtgtgtgactcctgtgaggacagcacatacacccagctctggaactgggttcccgagtgcttgagctgtggctcccgctgtagctctgaccaggtggaaactcaagcctgcactcgggaacagaaccgcatctgcacctgcaggcccggctggtactgcgcgctgagcaagcaggaggggtgccggctgtgcgcgccgctgcgcaagtgccgcccgggcttcggcgtggccagaccaggaactgaaacatcagacgtggtgtgcaagccctgtgccccggggacgttctccaacacgacttcatccacggatatttgcaggccccaccagatctgtaacgtggtggccatccctgggaatgcaagcatggatgcagtctgcacgtccacgtcccccacccggagtatggccccaggggcagtacacttaccccagccagtgtccacacgatcccaacacacgcagccaactccagaacccagcactgctccaagcacctccttcctgctcccaatgggccccagccccccagctgaagggagcactggcgacaccggtgagcccaaatcttctgacaaaactcacacatgcccaccgtgcccagcacctgaagccgcgggtgcaccgtcagtcttcctcttccccccaaaacccaaggacaccctcatgatctcccggacccctgaggtcacatgcgtggtggtggacgtgagccacgaagaccctgaggtcaagttcaactggtacgtggacggcgtggaggtgcataatgccaagacaaagccgcgggaggagcagtacaacagcacgtaccgtgtggtcagcgtcctcaccgtcctgcaccaggactggctgaatggcaaggcgtacgcgtgcgcggtctccaacaaagccctcccagcccccatcgagaaaaccatctccaaagccaaagggcagccccgagaaccacaggtgtacaccctgcccccatcccgggatgagctgaccaagaaccaggtcagcctgacctgcctggtcaaaggcttctatccaagcgacatcgccgtggagtgggagagcaatgggcagccggagaacaactacaagaccacgcctcccgtgctggactccgacggctccttcttcctctacagcaagctcaccgtggacaagagcaggtggcagcaggggaacgtcttctcatgctccgtgatgcatgaggctctgcacaaccactacacgcagaagagcctctccctgtctccgggtcagaggcacaacaattcttccctgaatacaagaactcagaaagcacgtcattctccgaattctgaagttcaattgttagagtctggtggcggtcttgttcagcctggtggtcctttacgtctttcttgcgctgcttccggattcactttctctcgttacggtatgatgtgggttcgccaagctcctggtaaaggtttggagtgggtttcttatatctcttcttctggtggctttactcgttatgctgactccgttaaaggtcgcttcactatctctagagacaactctaagaatactctctacttgcagatgaacagcttaagggctgaggacacggccgtgtattactgtgcgagagtgggtggatacagttatggcccacactttgacttctggggccagggcaccctggtcaccgtctcaagcggtggcggcggttcggggggtggcggaagtggaggtggagggagtcaagacatccagatgacccagtctccttccaccctgtctgcatctgtaggagacagagtcaccatcacttgccgggccagtcagagtattagtacctggttggcctggtttcagcagaaaccagggaaagcccctaagctgctgatctataaggcgtctagtttacaaagtggggtcccatcaaggttcagcggcagtggatctgggacagatttcactctcaccatcagcagcctgcagcctgaagattttgcaacttattactgccaacagtataagagttaccctttcactttcgggggagggaccaaggtggagatcaaatgagcggccgc

SEQ ID NO: 701 - DNA, 2294 bp, Artificial Sequence
  Made in a lab
aagcttgccgccatggattttcaagtgcagattttcagcttcctgctaatcagtgcttcagtcataatgtcgcgaggattgcccgcccaggtggcatttacaccctacgccccggagcccgggagcacatgccggctcagagaatactatgaccagacagctcagatgtgctgcagcaaatgctcgccgggccaacatgcaaaagtcttctgtaccaagacctcggacaccgtgtgtgactcctgtgaggacagcacatacacccagctctggaactgggttcccgagtgcttgagctgtggctcccgctgtagctctgaccaggtggaaactcaagcctgcactcgggaacagaaccgcatctgcacctgcaggcccggctggtactgcgcgctgagcaagcaggaggggtgccggctgtgcgcgccgctgcgcaagtgccgcccgggcttcggcgtggccagaccaggaactgaaacatcagacgtggtgtgcaagccctgtgccccggggacgttctccaacacgacttcatccacggatatttgcaggccccaccagatctgtaacgtggtggccatccctgggaatgcaagcatggatgcagtctgcacgtccacgtcccccacccggagtatggccccaggggcagtacacttaccccagccagtgtccacacgatcccaacacacgcagccaactccagaacccagcactgctccaagcacctccttcctgctcccaatgggccccagccccccagctgaagggagcactggcgacaccggtgagcccaaatcttctgacaaaactcacacatgcccaccgtgcccagcacctgaagccgcgggtgcaccgtcagtcttcctcttccccccaaaacccaaggacaccctcatgatctcccggacccctgaggtcacatgcgtggtggtggacgtgagccacgaagaccctgaggtcaagttcaactggtacgtggacggcgtggaggtgcataatgccaagacaaagccgcgggaggagcagtacaacagcacgtaccgtgtggtcagcgtcctcaccgtcctgcaccaggactggctgaatggcaaggcgtacgcgtgcgcggtctccaacaaagccctcccagcccccatcgagaaaaccatctccaaagccaaagggcagccccgagaaccacaggtgtacaccctgcccccatcccgggatgagctgaccaagaaccaggtcagcctgacctgcctggtcaaaggcttctatccaagcgacatcgccgtggagtgggagagcaatgggcagccggagaacaactacaagaccacgcctcccgtgctggactccgacggctccttcttcctctacagcaagctcaccgtggacaagagcaggtggcagcaggggaacgtcttctcatgctccgtgatgcatgaggctctgcacaaccactacacgcagaagagcctctccctgtctccgggtcagaggcacaacaattcttccctgaatacaagaactcagaaagcacgtcattctccgaattctgaagttcaattgttagagtctggtggcggtcttgttcagcctggtggttctttacgtctttcttgcgctgcttccggattcactttctcttggtaccatatgatttgggttcgccaagctcctggtaaaggtttggagtgggtttcttggatctctccttctggtggctttactaagtatgctgactccgttaaaggtcgcttcactatctctagagacaactctaagaatactctctacttgcagatgaacagcttaagggctgaggacacggccgtgtattactgtgcgaggtatgactctcgggcagcagctggtacgaatgcttttgatatctggggccaagggacaatggtcaccgtctcaagcggtggcggcggttcggggggtggcggaagtggaggtggagggagtcaagacatccagatgacccagtctccatcctccctgtctgcatctgttggagacagtgtcaccatcacttgccaggcgagtcaggacattaggtcctatttaaattggtttcagcagaaaccagggaaagcccctaagctcctgatctacgacacagtcaatttgcaaacaggggtcccatcgaggttcagtggaagtggatctgggacagattatagtttcaccatcaacaacctgcagcctgaagactttgcaacatattgctgtcaacagtatgaatatctcccgatcaccttcggccaagggacacgactggagattaaatgagcggccgc

SEQ ID NO: 702 - DNA, 2301 bp, Artificial Sequence
  Made in a lab
gcgagggaagcttgccgccatggattttcaagtgcagattttcagcttcctgctaatcagtgcttcagtcataatgtcgcgaggattgcccgcccaggtggcatttacaccctacgccccggagcccgggagcacatgccggctcagagaatactatgaccagacagctcagatgtgctgcagcaaatgctcgccgggccaacatgcaaaagtcttctgtaccaagacctcggacaccgtgtgtgactcctgtgaggacagcacatacacccagctctggaactgggttcccgagtgcttgagctgtggctcccgctgtagctctgaccaggtggaaactcaagcctgcactcgggaacagaaccgcatctgcacctgcaggcccggctggtactgcgcgctgagcaagcaggaggggtgccggctgtgcgcgccgctgcgcaagtgccgcccgggcttcggcgtggccagaccaggaactgaaacatcagacgtggtgtgcaagccctgtgccccggggacgttctccaacacgacttcatccacggatatttgcaggccccaccagatctgtaacgtggtggccatccctgggaatgcaagcatggatgcagtctgcacgtccacgtcccccacccggagtatggccccaggggcagtacacttaccccagccagtgtccacacgatcccaacacacgcagccaactccagaacccagcactgctccaagcacctccttcctgctcccaatgggccccagccccccagctgaagggagcactggcgacaccggtgagcccaaatcttctgacaaaactcacacatgcccaccgtgcccagcacctgaagccgcgggtgcaccgtcagtcttcctcttccccccaaaacccaaggacaccctcatgatctcccggacccctgaggtcacatgcgtggtggtggacgtgagccacgaagaccctgaggtcaagttcaactggtacgtggacggcgtggaggtgcataatgccaagacaaagccgcgggaggagcagtacaacagcacgtaccgtgtggtcagcgtcctcaccgtcctgcaccaggactggctgaatggcaaggcgtacgcgtgcgcggtctccaacaaagccctcccagcccccatcgagaaaaccatctccaaagccaaagggcagccccgagaaccacaggtgtacaccctgcccccatcccgggatgagctgaccaagaaccaggtcagcctgacctgcctggtcaaaggcttctatccaagcgacatcgccgtggagtgggagagcaatgggcagccggagaacaactacaagaccacgcctcccgtgctggactccgacggctccttcttcctctacagcaagctcaccgtggacaagagcaggtggcagcaggggaacgtcttctcatgctccgtgatgcatgaggctctgcacaaccactacacgcagaagagcctctccctgtctccgggtcagaggcacaacaattcttccctgaatacaagaactcagaaagcacgtcattctccgaattctgaagttcaattgttagagtctggtggcggtcttgttcagcctggtggttctttacgtctttcttgcgctgcttccggattcactttctctccttacaagatggtttgggttcgccaagctcctggtaaaggtttggagtgggtttctggtatctctccttctggtggctatacttattatgctgactccgttaaaggtcgcttcactatctctagagacaactctaagaatactctctacttgcagatgaacagcttaagggctgaggacacggccgtgtattactgtgcgagagggggatatggctggagctactactactacggtatggacgtctggggccaagggaccacggtcaccgtctcaagcggtggcggcggttcggggggtggcggaagtggaggtggagggagtcaagacatccagatgacccagtctccatcctccctgtctgcatctgtcggggacagagtcaccatcacttgccgggcaagtcagagcatcagcaactatttaaattggtatcagcagaaatcagggaaagcccctaacctcctgatgtatgccgcatccagtttacacagtggggtctcgtccaggttcagtggtagtggatctgggacagagttcactctcaccatcagcagtctgcaacctgaagattatgcaacttactactgtcaacagagttacagtacctcgggaacgttcggccaagggaccaaggtggaaatcaaatgagcggccgc

SEQ ID NO: 703 - DNA, 2279 bp, Artificial Sequence
  Made in a lab
aagcttgccgccatggattttcaagtgcagattttcagcttcctgctaatcagtgcttcagtcataatgtcgcgaggattgcccgcccaggtggcatttacaccctacgccccggagcccgggagcacatgccggctcagagaatactatgaccagacagctcagatgtgctgcagcaaatgctcgccgggccaacatgcaaaagtcttctgtaccaagacctcggacaccgtgtgtgactcctgtgaggacagcacatacacccagctctggaactgggttcccgagtgcttgagctgtggctcccgctgtagctctgaccaggtggaaactcaagcctgcactcgggaacagaaccgcatctgcacctgcaggcccggctggtactgcgcgctgagcaagcaggaggggtgccggctgtgcgcgccgctgcgcaagtgccgcccgggcttcggcgtggccagaccaggaactgaaacatcagacgtggtgtgcaagccctgtgccccggggacgttctccaacacgacttcatccacggatatttgcaggccccaccagatctgtaacgtggtggccatccctgggaatgcaagcatggatgcagtctgcacgtccacgtcccccacccggagtatggccccaggggcagtacacttaccccagccagtgtccacacgatcccaacacacgcagccaactccagaacccagcactgctccaagcacctccttcctgctcccaatgggccccagccccccagctgaagggagcactggcgacaccggtgagcccaaatcttctgacaaaactcacacatgcccaccgtgcccagcacctgaagccgcgggtgcaccgtcagtcttcctcttccccccaaaacccaaggacaccctcatgatctcccggacccctgaggtcacatgcgtggtggtggacgtgagccacgaagaccctgaggtcaagttcaactggtacgtggacggcgtggaggtgcataatgccaagacaaagccgcgggaggagcagtacaacagcacgtaccgtgtggtcagcgtcctcaccgtcctgcaccaggactggctgaatggcaaggcgtacgcgtgcgcggtctccaacaaagccctcccagcccccatcgagaaaaccatctccaaagccaaagggcagccccgagaaccacaggtgtacaccctgcccccatcccgggatgagctgaccaagaaccaggtcagcctgacctgcctggtcaaaggcttctatccaagcgacatcgccgtggagtgggagagcaatgggcagccggagaacaactacaagaccacgcctcccgtgctggactccgacggctccttcttcctctacagcaagctcaccgtggacaagagcaggtggcagcaggggaacgtcttctcatgctccgtgatgcatgaggctctgcacaaccactacacgcagaagagcctctccctgtctccgggtcagaggcacaacaattcttccctgaatacaagaactcagaaagcacgtcattctccgaattctgaagttcaattgttagagtctggtggcggtcttgttcagcctggtggttctttacgtctttcttgcgctgcttccggattcactttctctaattactggatgtattgggttcgccaagctcctggtaaaggtttggagtgggtttctgttatctcttcttctggtggccatactttttatgctgactccgttaaaggtcgcttcactatctctagagacaactctaagaatactctctacttgcagatgaacagcttaagggctgaggacactgcagtctactattgtgcgagagattatgaaggtgggagcaatgactactggggccagggaaccctggtcaccgtctcaagcggtggcggcggttcggggggtggcggaagtggaggtggagggagtcaagacatccagatgacccagtctccatcctccctgtctgcatctgtaggagacagagtcaccatcacttgccgggcaagtcagagcattagcagctatttaaattggtatcagcagaaaccagggaaagcccctaagctcctgatctatgctgcatccagtttgcaaagtggggtcccatcaaggttcagtggcagtggatctgggacagatttcactctcaccatcagcagtctgcaacctgaagattttgcaacttactactgtcaacagagttacagtacccccgtcactttcggcggagggaccaaggtggagatcaaatgagcggccgc

SEQ ID NO: 704 - DNA, 2288 bp, Artificial Sequence
  Made in a lab
aagcttgccgccatggattttcaagtgcagattttcagcttcctgctaatcagtgcttcagtcataatgtcgcgaggattgcccgcccaggtggcatttacaccctacgccccggagcccgggagcacatgccggctcagagaatactatgaccagacagctcagatgtgctgcagcaaatgctcgccgggccaacatgcaaaagtcttctgtaccaagacctcggacaccgtgtgtgactcctgtgaggacagcacatacacccagctctggaactgggttcccgagtgcttgagctgtggctcccgctgtagctctgaccaggtggaaactcaagcctgcactcgggaacagaaccgcatctgcacctgcaggcccggctggtactgcgcgctgagcaagcaggaggggtgccggctgtgcgcgccgctgcgcaagtgccgcccgggcttcggcgtggccagaccaggaactgaaacatcagacgtggtgtgcaagccctgtgccccggggacgttctccaacacgacttcatccacggatatttgcaggccccaccagatctgtaacgtggtggccatccctgggaatgcaagcatggatgcagtctgcacgtccacgtcccccacccggagtatggccccaggggcagtacacttaccccagccagtgtccacacgatcccaacacacgcagccaactccagaacccagcactgctccaagcacctccttcctgctcccaatgggccccagccccccagctgaagggagcactggcgacaccggtgagcccaaatcttctgacaaaactcacacatgcccaccgtgcccagcacctgaagccgcgggtgcaccgtcagtcttcctcttccccccaaaacccaaggacaccctcatgatctcccggacccctgaggtcacatgcgtggtggtggacgtgagccacgaagaccctgaggtcaagttcaactggtacgtggacggcgtggaggtgcataatgccaagacaaagccgcgggaggagcagtacaacagcacgtaccgtgtggtcagcgtcctcaccgtcctgcaccaggactggctgaatggcaaggcgtacgcgtgcgcggtctccaacaaagccctcccagcccccatcgagaaaaccatctccaaagccaaagggcagccccgagaaccacaggtgtacaccctgcccccatcccgggatgagctgaccaagaaccaggtcagcctgacctgcctggtcaaaggcttctatccaagcgacatcgccgtggagtgggagagcaatgggcagccggagaacaactacaagaccacgcctcccgtgctggactccgacggctccttcttcctctacagcaagctcaccgtggacaagagcaggtggcagcaggggaacgtcttctcatgctccgtgatgcatgaggctctgcacaaccactacacgcagaagagcctctccctgtctccgggtcagaggcacaacaattcttccctgaatacaagaactcagaaagcacgtcattctccgaattctgaagttcaattgttagagtctggtggcggtcttgttcagcctggtggttctttacgtctttcttgcgctgcttccggattcactttctctaattacgctatgtcttgggttcgccaagctcctggtaaaggtttggagtgggtttcttctatctattcttctggtggctatactgcttatgctgactccgttaaaggtcgcttcactatctctagagacaactctaagaatactctctacttgcagatgaacagcttaagggctgaggacaccgccatgtattactgtgcacgggtcccccatgtgtttcggggcgagcttgactactggggccagggaaccctggtcaccgtctcaagcggtggcggcggttcggggggtggcggaagtggaggtggagggagtcaagacatccagatgacccagtctccatcctccctgtctgcatctgtgggagacagagtcgccatcacttgccgcgcaagtcagagcatcgacacctatttaaattggtatcagcataaaccagggaaagcccctaaactcctgatctatgctgcatccagtttgcagagtggggtcccatcaaggttcagtggcagcggatctgggacagatttcactctcaccatcagcggtctgcaacctgaagattttgcaagttatttctgtcaacagagctactctagtccagggatcactttcggcggagggaccagggtggaaatcaaatgagcggccgc

SEQ ID NO: 705 - DNA, 2291 bp, Artificial Sequence
  Made in a lab
aagcttgccgccatggattttcaagtgcagattttcagcttcctgctaatcagtgcttcagtcataatgtcgcgaggattgcccgcccaggtggcatttacaccctacgccccggagcccgggagcacatgccggctcagagaatactatgaccagacagctcagatgtgctgcagcaaatgctcgccgggccaacatgcaaaagtcttctgtaccaagacctcggacaccgtgtgtgactcctgtgaggacagcacatacacccagctctggaactgggttcccgagtgcttgagctgtggctcccgctgtagctctgaccaggtggaaactcaagcctgcactcgggaacagaaccgcatctgcacctgcaggcccggctggtactgcgcgctgagcaagcaggaggggtgccggctgtgcgcgccgctgcgcaagtgccgcccgggcttcggcgtggccagaccaggaactgaaacatcagacgtggtgtgcaagccctgtgccccggggacgttctccaacacgacttcatccacggatatttgcaggccccaccagatctgtaacgtggtggccatccctgggaatgcaagcatggatgcagtctgcacgtccacgtcccccacccggagtatggccccaggggcagtacacttaccccagccagtgtccacacgatcccaacacacgcagccaactccagaacccagcactgctccaagcacctccttcctgctcccaatgggccccagccccccagctgaagggagcactggcgacaccggtgagcccaaatcttctgacaaaactcacacatgcccaccgtgcccagcacctgaagccgcgggtgcaccgtcagtcttcctcttccccccaaaacccaaggacaccctcatgatctcccggacccctgaggtcacatgcgtggtggtggacgtgagccacgaagaccctgaggtcaagttcaactggtacgtggacggcgtggaggtgcataatgccaagacaaagccgcgggaggagcagtacaacagcacgtaccgtgtggtcagcgtcctcaccgtcctgcaccaggactggctgaatggcaaggcgtacgcgtgcgcggtctccaacaaagccctcccagcccccatcgagaaaaccatctccaaagccaaagggcagccccgagaaccacaggtgtacaccctgcccccatcccgggatgagctgaccaagaaccaggtcagcctgacctgcctggtcaaaggcttctatccaagcgacatcgccgtggagtgggagagcaatgggcagccggagaacaactacaagaccacgcctcccgtgctggactccgacggctccttcttcctctacagcaagctcaccgtggacaagagcaggtggcagcaggggaacgtcttctcatgctccgtgatgcatgaggctctgcacaaccactacacgcagaagagcctctccctgtctccgggtcagaggcacaacaattcttccctgaatacaagaactcagaaagcacgtcattctccgaattctgaagttcaattgttagagtctggtggcggtcttgttcagcctggtggttctttacgtctttcttgcgctgcttccggattcactttctctttttacactatgtggtgggttcgccaagctcctggtaaaggtttggagtgggtttcttctatctatccttctggtggccagactctttatgctgactccgttaaaggtcgcttcactatctctagagacaactctaagaatactctctacttgcagatgaacagcttaagggctgaggacacggccgtgtattactgtgcgaggcccgacagctatggttacctctactacggtatggacgtctggggccaagggaccacggtcaccgtctcaagcggtggcggcggttcggggggtggcggaagtggaggtggagggagtcaagacatccagatgacccagtctccatcctccctgtctgcatctgtcggagacagagtcaccatcacttgccgggcaagtcagagcattggcacctatttaaactggtatcagcagaagccagggaaagcccctaacctcctgatctatgggacatccagtttgcaaagaggggtcccatcaaggttcagtggcagtggatctgggacagatttcactctcaccataagtaccttgcaacctgaagattttgtacattactactgtcaacagagttacacttcccctccgacgttcggccaagggaccaaggtggaggtcaaatgagcggccgc

SEQ ID NO: 706 - DNA, 2264 bp, Artificial Sequence
  Made in a lab
aagcttgccgccatggattttcaagtgcagattttcagcttcctgctaatcagtgcttcagtcataatgtcgcgaggattgcccgcccaggtggcatttacaccctacgccccggagcccgggagcacatgccggctcagagaatactatgaccagacagctcagatgtgctgcagcaaatgctcgccgggccaacatgcaaaagtcttctgtaccaagacctcggacaccgtgtgtgactcctgtgaggacagcacatacacccagctctggaactgggttcccgagtgcttgagctgtggctcccgctgtagctctgaccaggtggaaactcaagcctgcactcgggaacagaaccgcatctgcacctgcaggcccggctggtactgcgcgctgagcaagcaggaggggtgccggctgtgcgcgccgctgcgcaagtgccgcccgggcttcggcgtggccagaccaggaactgaaacatcagacgtggtgtgcaagccctgtgccccggggacgttctccaacacgacttcatccacggatatttgcaggccccaccagatctgtaacgtggtggccatccctgggaatgcaagcatggatgcagtctgcacgtccacgtcccccacccggagtatggccccaggggcagtacacttaccccagccagtgtccacacgatcccaacacacgcagccaactccagaacccagcactgctccaagcacctccttcctgctcccaatgggccccagccccccagctgaagggagcactggcgacaccggtgagcccaaatcttctgacaaaactcacacatgcccaccgtgcccagcacctgaagccgcgggtgcaccgtcagtcttcctcttccccccaaaacccaaggacaccctcatgatctcccggacccctgaggtcacatgcgtggtggtggacgtgagccacgaagaccctgaggtcaagttcaactggtacgtggacggcgtggaggtgcataatgccaagacaaagccgcgggaggagcagtacaacagcacgtaccgtgtggtcagcgtcctcaccgtcctgcaccaggactggctgaatggcaaggcgtacgcgtgcgcggtctccaacaaagccctcccagcccccatcgagaaaaccatctccaaagccaaagggcagccccgagaaccacaggtgtacaccctgcccccatcccgggatgagctgaccaagaaccaggtcagcctgacctgcctggtcaaaggcttctatccaagcgacatcgccgtggagtgggagagcaatgggcagccggagaacaactacaagaccacgcctcccgtgctggactccgacggctccttcttcctctacagcaagctcaccgtggacaagagcaggtggcagcaggggaacgtcttctcatgctccgtgatgcatgaggctctgcacaaccactacacgcagaagagcctctccctgtctccgggtcagaggcacaacaattcttccctgaatacaagaactcagaaagcacgtcattctccgaattctgaagttcaattgttagagtctggtggcggtcttgttcagcctggtggttctttacgtctttcttgcgctgcttccggattcactttctcttggtaccctatggagtgggttcgccaagctcctggtaaaggtttggagtgggtttctggtatcggtccttctggtggccagactacttatgctgactccgttaaaggtcgcttcactatctctagagacaactctaagaatactctctacttgcagatgaacagcttaagggctgaggacacggccgtgtattactgtgcaagagggtcttacagttttatctggggccaagggacaatggtcaccgtctcaagcggtggcggcggttcggggggtggcggaagtggaggtggagggagtcagtacgaattgactcagtcaccctcggtgtccgtgtccccaggacagacagccagcatcccctgctctggagatcaattggggggtaaatttacttcctggtatcaacagaaggcaggccagtctcctctcctggtcatctatcaagatactaagcggccctcagggatccctgagcgattctctggctccaattctgggaacacagccactctgaccatcaccgggacccaggctatggatgaggctgactattactgtctggtgtgggacagcaacacttatgtcttcggacctgggaccaaggtcaccgtcctgtgagcggccgc

SEQ ID NO: 707 - DNA, 2300 bp, Artificial Sequence
  Made in a lab
aagcttgccgccatggattttcaagtgcagattttcagcttcctgctaatcagtgcttcagtcataatgtcgcgaggattgcccgcccaggtggcatttacaccctacgccccggagcccgggagcacatgccggctcagagaatactatgaccagacagctcagatgtgctgcagcaaatgctcgccgggccaacatgcaaaagtcttctgtaccaagacctcggacaccgtgtgtgactcctgtgaggacagcacatacacccagctctggaactgggttcccgagtgcttgagctgtggctcccgctgtagctctgaccaggtggaaactcaagcctgcactcgggaacagaaccgcatctgcacctgcaggcccggctggtactgcgcgctgagcaagcaggaggggtgccggctgtgcgcgccgctgcgcaagtgccgcccgggcttcggcgtggccagaccaggaactgaaacatcagacgtggtgtgcaagccctgtgccccggggacgttctccaacacgacttcatccacggatatttgcaggccccaccagatctgtaacgtggtggccatccctgggaatgcaagcatggatgcagtctgcacgtccacgtcccccacccggagtatggccccaggggcagtacacttaccccagccagtgtccacacgatcccaacacacgcagccaactccagaacccagcactgctccaagcacctccttcctgctcccaatgggccccagccccccagctgaagggagcactggcgacaccggtgagcccaaatcttctgacaaaactcacacatgcccaccgtgcccagcacctgaagccgcgggtgcaccgtcagtcttcctcttccccccaaaacccaaggacaccctcatgatctcccggacccctgaggtcacatgcgtggtggtggacgtgagccacgaagaccctgaggtcaagttcaactggtacgtggacggcgtggaggtgcataatgccaagacaaagccgcgggaggagcagtacaacagcacgtaccgtgtggtcagcgtcctcaccgtcctgcaccaggactggctgaatggcaaggcgtacgcgtgcgcggtctccaacaaagccctcccagcccccatcgagaaaaccatctccaaagccaaagggcagccccgagaaccacaggtgtacaccctgcccccatcccgggatgagctgaccaagaaccaggtcagcctgacctgcctggtcaaaggcttctatccaagcgacatcgccgtggagtgggagagcaatgggcagccggagaacaactacaagaccacgcctcccgtgctggactccgacggctccttcttcctctacagcaagctcaccgtggacaagagcaggtggcagcaggggaacgtcttctcatgctccgtgatgcatgaggctctgcacaaccactacacgcagaagagcctctccctgtctccgggtcagaggcacaacaattcttccctgaatacaagaactcagaaagcacgtcattctccgaattctgaagttcaattgttagagtctggtggcggtcttgttcagcctggtggttctttacgtctttcttgcgctgcttccggattcactttctctctttacaagatggcttgggttcgccaagctcctggtaaaggtttggagtgggtttctgttatcggttcttctggtggccgtactccttatgctgactccgttaaaggtcgcttcactatctctagagacaactctaagaatactctctacttgcagatgaacagcttaagggctgaggacacggccgtgtattactgtgcgagagctcctctgagcggatggttcgggcaagcacatgatgcttttgatatctggggccaagggacaatggtcaccgtctcaagcggtggcggcggttcggggggtggcggaagtggaggtggagggagtcagtacgaattgactcagtcaccctcggtgtcagtggccccaggacagacggccaggattacttgtgggggaaacaacattggaagtaaaagtgtacactggtatcagcagaagccaggccaggcccctgtactggtcgtctatgatgatagcgaccggccctcagggatccctgagcgattctctggctccaactctgggaacacggccaccctgaccgtcagcagggtcgaagccggcgatgaggccgactattactgtcaggtgtgggatagtagtggtggtctgcaagtcttcggaactgggaccaaggtcaccgtcctatgagcggccgc

SEQ ID NO: 708 - DNA, 2378 bp, Artificial Sequence
  Made in a lab
tggcttatcgaattaatacgactcactatagggagacccaagcttgccgccatggattttcaagtgcagattttcagcttcctgctaatcagtgcttcagtcataatgtcgcgaggattgcccgcccaggtggcatttacaccctacgccccggagcccgggagcacatgccggctcagagaatactatgaccagacagctcagatgtgctgcagcaaatgctcgccgggccaacatgcaaaagtcttctgtaccaagacctcggacaccgtgtgtgactcctgtgaggacagcacatacacccagctctggaactgggttcccgagtgcttgagctgtggctcccgctgtagctctgaccaggtggaaactcaagcctgcactcgggaacagaaccgcatctgcacctgcaggcccggctggtactgcgcgctgagcaagcaggaggggtgccggctgtgcgcgccgctgcgcaagtgccgcccgggcttcggcgtggccagaccaggaactgaaacatcagacgtggtgtgcaagccctgtgccccggggacgttctccaacacgacttcatccacggatatttgcaggccccaccagatctgtaacgtggtggccatccctgggaatgcaagcatggatgcagtctgcacgtccacgtcccccacccggagtatggccccaggggcagtacacttaccccagccagtgtccacacgatcccaacacacgcagccaactccagaacccagcactgctccaagcacctccttcctgctcccaatgggccccagccccccagctgaagggagcactggcgacaccggtgagcccaaatcttctgacaaaactcacacatgcccaccgtgcccagcacctgaagccgcgggtgcaccgtcagtcttcctcttccccccaaaacccaaggacaccctcatgatctcccggacccctgaggtcacatgcgtggtggtggacgtgagccacgaagaccctgaggtcaagttcaactggtacgtggacggcgtggaggtgcataatgccaagacaaagccgcgggaggagcagtacaacagcacgtaccgtgtggtcagcgtcctcaccgtcctgcaccaggactggctgaatggcaaggcgtacgcgtgcgcggtctccaacaaagccctcccagcccccatcgagaaaaccatctccaaagccaaagggcagccccgagaaccacaggtgtacaccctgcccccatcccgggatgagctgaccaagaaccaggtcagcctgacctgcctggtcaaaggcttctatccaagcgacatcgccgtggagtgggagagcaatgggcagccggagaacaactacaagaccacgcctcccgtgctggactccgacggctccttcttcctctacagcaagctcaccgtggacaagagcaggtggcagcaggggaacgtcttctcatgctccgtgatgcatgaggctctgcacaaccactacacgcagaagagcctctccctgtctccgggtcagaggcacaacaattcttccctgaatacaagaactcagaaagcacgtcattctccgaattctgaagttcaattgttagagtctggtggcggtcttgttcagcctggtggttctttacgtctttcttgcgctgcttccggattcactttctctacttacgagatgaattgggttcgccaagctcctggtaaaggtttggagtgggtttctggtatcgttccttctggtggcgttacttattatgctgactccgttaaaggtcgcttcactatctctagagacaactctaagaatactctctacttgcagatgaacagcttaagggctgaggacacggccgtgtattactgtgcgaggggaccgtacagctatggtcacgactacggtatggacgtctggggccaagggaccacggtcaccgtctcaagcggtggcggcggttcggggggtggcggaagtggaggtggagggagtcaagacatccagatgacccagtctccttccaccctgtctgcatctgtaggagacagggtcaccatcacttgccgggccagtcagagtattagtagctggttggcctggtatcagcagaaaccagggaaagcccctaagctcctgatctataaggcgtctaatttagaaagtgaggtcccatcaaggttcagcggcagtggatctgggacagaattcactctcaccatcagcagcctgcagcctgatgattttgcaacttattactgccaacagtataatgcttatccattcattttcggccctgggaccaaagtggatatcaaatgagcggccgcctcgagtctagagggccctattctatagtgtcacctaaatgctagagc

SEQ ID NO: 709 - DNA, 2369 bp, Artificial Sequence
  Made in a lab
ttactggcttatcgaattatacgactcactatagggagacccaagcttgccgccatggattttcaagtgcagattttcagcttcctgctaatcagtgcttcagtcataatgtcgcgaggattgcccgcccaggtggcatttacaccctacgccccggagcccgggagcacatgccggctcagagaatactatgaccagacagctcagatgtgctgcagcaaatgctcgccgggccaacatgcaaaagtcttctgtaccaagacctcggacaccgtgtgtgactcctgtgaggacagcacatacacccagctctggaactgggttcccgagtgcttgagctgtggctcccgctgtagctctgaccaggtggaaactcaagcctgcactcgggaacagaaccgcatctgcacctgcaggcccggctggtactgcgcgctgagcaagcaggaggggtgccggctgtgcgcgccgctgcgcaagtgccgcccgggcttcggcgtggccagaccaggaactgaaacatcagacgtggtgtgcaagccctgtgccccggggacgttctccaacacgacttcatccacggatatttgcaggccccaccagatctgtaacgtggtggccatccctgggaatgcaagcatggatgcagtctgcacgtccacgtcccccacccggagtatggccccaggggcagtacacttaccccagccagtgtccacacgatcccaacacacgcagccaactccagaacccagcactgctccaagcacctccttcctgctcccaatgggccccagccccccagctgaagggagcactggcgacaccggtgagcccaaatcttctgacaaaactcacacatgcccaccgtgcccagcacctgaagccgcgggtgcaccgtcagtcttcctcttccccccaaaacccaaggacaccctcatgatctcccggacccctgaggtcacatgcgtggtggtggacgtgagccacgaagaccctgaggtcaagttcaactggtacgtggacggcgtggaggtgcataatgccaagacaaagccgcgggaggagcagtacaacagcacgtaccgtgtggtcagcgtcctcaccgtcctgcaccaggactggctgaatggcaaggcgtacgcgtgcgcggtctccaacaaagccctcccagcccccatcgagaaaaccatctccaaagccaaagggcagccccgagaaccacaggtgtacaccctgcccccatcccgggatgagctgaccaagaaccaggtcagcctgacctgcctggtcaaaggcttctatccaagcgacatcgccgtggagtgggagagcaatgggcagccggagaacaactacaagaccacgcctcccgtgctggactccgacggctccttcttcctctacagcaagctcaccgtggacaagagcaggtggcagcaggggaacgtcttctcatgctccgtgatgcatgaggctctgcacaaccactacacgcagaagagcctctccctgtctccgggtcagaggcacaacaattcttccctgaatacaagaactcagaaagcacgtcattctccgaattctgaagttcaattgttagagtctggtggcggtcttgttcagcctggtggttctttacgtctttcttgcgctgcttccggattcactttctctgtttaccctatgcattgggttcgccaagctcctggtaaaggtttggagtgggtttcttctatctattcttctggtggctttactatgtatgctgactccgttaaaggtcgcttcactatctctagagacaactctaagaatactctctacttgcagatgaacagcttaagggctgaggacacggccgtgtattactgtgtgagagaaggggtggcggatgcttttgatatctggggccaagggacaatggtcaccgtctcaagcggtggcggcggttcggggggtggcggaagtggaggtggagggagtcaagacatccagatgacccagtctccttccaccctgtctgcatctgtaggagacagagtcaccatcacttgccgggccagtcagagtattagtagctggttggcctggtatcagcagaaaccagggaaagcccctaagctcctgatctataaggcgtctagtttagaaagtggggtcccatcaaggttcagcggcagtggatctgggacagaattcactctcaccatcagcagcctgcagcctgatgattttgcaacttatcactgccaacagtataaaagttactggacgttcggccaagggaccaaggtggaaatcaaatgagcggccgcctcgagtctagagggccctattctatagtgtcacctaaatgctagagctcg

SEQ ID NO: 710 - DNA, 2291 bp, Artificial Sequence
  Made in a lab
aagcttgccgccatggattttcaagtgcagattttcagcttcctgctaatcagtgcttcagtcataatgtcgcgaggattgcccgcccaggtggcatttacaccctacgccccggagcccgggagcacatgccggctcagagaatactatgaccagacagctcagatgtgctgcagcaaatgctcgccgggccaacatgcaaaagtcttctgtaccaagacctcggacaccgtgtgtgactcctgtgaggacagcacatacacccagctctggaactgggttcccgagtgcttgagctgtggctcccgctgtagctctgaccaggtggaaactcaagcctgcactcgggaacagaaccgcatctgcacctgcaggcccggctggtactgcgcgctgagcaagcaggaggggtgccggctgtgcgcgccgctgcgcaagtgccgcccgggcttcggcgtggccagaccaggaactgaaacatcagacgtggtgtgcaagccctgtgccccggggacgttctccaacacgacttcatccacggatatttgcaggccccaccagatctgtaacgtggtggccatccctgggaatgcaagcatggatgcagtctgcacgtccacgtcccccacccggagtatggccccaggggcagtacacttaccccagccagtgtccacacgatcccaacacacgcagccaactccagaacccagcactgctccaagcacctccttcctgctcccaatgggccccagccccccagctgaagggagcactggcgacaccggtgagcccaaatcttctgacaaaactcacacatgcccaccgtgcccagcacctgaagccgcgggtgcaccgtcagtcttcctcttccccccaaaacccaaggacaccctcatgatctcccggacccctgaggtcacatgcgtggtggtggacgtgagccacgaagaccctgaggtcaagttcaactggtacgtggacggcgtggaggtgcataatgccaagacaaagccgcgggaggagcagtacaacagcacgtaccgtgtggtcagcgtcctcaccgtcctgcaccaggactggctgaatggcaaggcgtacgcgtgcgcggtctccaacaaagccctcccagcccccatcgagaaaaccatctccaaagccaaagggcagccccgagaaccacaggtgtacaccctgcccccatcccgggatgagctgaccaagaaccaggtcagcctgacctgcctggtcaaaggcttctatccaagcgacatcgccgtggagtgggagagcaatgggcagccggagaacaactacaagaccacgcctcccgtgctggactccgacggctccttcttcctctacagcaagctcaccgtggacaagagcaggtggcagcaggggaacgtcttctcatgctccgtgatgcatgaggctctgcacaaccactacacgcagaagagcctctccctgtctccgggtcagaggcacaacaattcttccctgaatacaagaactcagaaagcacgtcattctccgaattctgaagttcaattgttagagtctggtggcggtcttgttcagcctggtggttctttacgtctttcttgcgctgcttccggattcactttctcttcttacactatgcattgggttcgccaagctcctggtaaaggtttggagtgggtttcttctatctctccttctggtggcatgactttttatgctgactccgttaaaggtcgcttcactatctctagagacaactctaagaatactctctacttgcagatgaacagcttaagggctgaggacactgcagtctactattgtgcgagaacttacgatttttggagtggttattttgactactggggccagggaactctggtcaccgtctcaagcggtggcggcggttcggggggtggcggaagtggaggtggagggagtcagagcgaattgactcagccaccctcggtatctgaagcccccaggcagagggtcaccgtctcctgttctggaagcccctccaacatcggaagtaattctgtaaactggtaccaacagctcccaggaaaggctcccaaagtcgtcatctattatgatgatctggtgccctcaggagtctctgaccgattctctggctccaagtctggcacttcagcctccctggccatcagtgggctccagtctgaggatgaggctgattattactgtgcagcatgggatgacaggctgaatggttgggtgttcggcggagggaccaagctgaccgtcctatgagcggccgc

SEQ ID NO: 711 - DNA, 2299 bp, Artificial Sequence
  Made in a lab
agcttgccgccatggattttcaagtgcagattttcagcttcctgctaatcagtgcttcagtcataatgtcgcgaggattgcccgcccaggtggcatttacaccctacgccccggagcccgggagcacatgccggctcagagaatactatgaccagacagctcagatgtgctgcagcaaatgctcgccgggccaacatgcaaaagtcttctgtaccaagacctcggacaccgtgtgtgactcctgtgaggacagcacatacacccagctctggaactgggttcccgagtgcttgagctgtggctcccgctgtagctctgaccaggtggaaactcaagcctgcactcgggaacagaaccgcatctgcacctgcaggcccggctggtactgcgcgctgagcaagcaggaggggtgccggctgtgcgcgccgctgcgcaagtgccgcccgggcttcggcgtggccagaccaggaactgaaacatcagacgtggtgtgcaagccctgtgccccggggacgttctccaacacgacttcatccacggatatttgcaggccccaccagatctgtaacgtggtggccatccctgggaatgcaagcatggatgcagtctgcacgtccacgtcccccacccggagtatggccccaggggcagtacacttaccccagccagtgtccacacgatcccaacacacgcagccaactccagaacccagcactgctccaagcacctccttcctgctcccaatgggccccagccccccagctgaagggagcactggcgacaccggtgagcccaaatcttctgacaaaactcacacatgcccaccgtgcccagcacctgaagccgcgggtgcaccgtcagtcttcctcttccccccaaaacccaaggacaccctcatgatctcccggacccctgaggtcacatgcgtggtggtggacgtgagccacgaagaccctgaggtcaagttcaactggtacgtggacggcgtggaggtgcataatgccaagacaaagccgcgggaggagcagtacaacagcacgtaccgtgtggtcagcgtcctcaccgtcctgcaccaggactggctgaatggcaaggcgtacgcgtgcgcggtctccaacaaagccctcccagcccccatcgagaaaaccatctccaaagccaaagggcagccccgagaaccacaggtgtacaccctgcccccatcccgggatgagctgaccaagaaccaggtcagcctgacctgcctggtcaaaggcttctatccaagcgacatcgccgtggagtgggagagcaatgggcagccggagaacaactacaagaccacgcctcccgtgctggactccgacggctccttcttcctctacagcaagctcaccgtggacaagagcaggtggcagcaggggaacgtcttctcatgctccgtgatgcatgaggctctgcacaaccactacacgcagaagagcctctccctgtctccgggtcagaggcacaacaattcttccctgaatacaagaactcagaaagcacgtcattctccgaattctgaagttcaattgttagagtctggtggcggtcttgttcagcctggtggttctttacgtctttcttgcgctgcttccggattcactttctctacttacgagatgggttgggttcgccaagctcctggtaaaggtttggagtgggtttctgttatctggtcttctggtggccatacttggtatgctgactccgttaaaggtcgcttcactatctctagagacaactctaagaatactctctacttgcagatgaacagcttaagggctgaggacacggctgtgtattactgtgcgagaagcaatcagggcgatttttggagtggttatccgtttgcttttgatatctggggccaagggacaatggtcaccgtctcaagcggtggcggcggttcggggggtggcggaagtggaggtggagggagtcaagacatccagatgacccagtctccatcttccgtgtctgcatctgtaggagacagagtcaccatcacttgtcgggcgagtcagggtattagcagctggttagcctggtatcagcagaaaccagggaaagcccctaagctcctgatctatgctgcatccagtttgcaaagtggggtcccatcaaggttcagcggcagtggatctgggacagatttcactctcaccatcagcagcctgcagcctgaagattttgcaacttactattgtcaacaggctaacagtttccctctcactttcggcggagggaccaaggtggagatcaaatgagcggccgc

SEQ ID NO: 712 - DNA, 2362 bp, Artificial Sequence
  Made in a lab
tatcgattatacgactcactatagggagacccaagcttgcccccatggattttcaagtgcagattttcagcttcctgctaatcagtgcttcagtcataatgtcgcgaggattgcccgcccaggtggcatttacaccctacgccccggagcccgggagcacatgccggctcagagaatactatgaccagacagctcagatgtgctgcagcaaatgctcgccgggccaacatgcaaaagtcttctgtaccaagacctcggacaccgtgtgtgactcctgtgaggacagcacatacacccagctctggaactgggttcccgagtgcttgagctgtggctcccgctgtagctctgaccaggtggaaactcaagcctgcactcgggaacagaaccgcatctgcacctgcaggcccggctggtactgcgcgctgagcaagcaggaggggtgccggctgtgcgcgccgctgcgcaagtgccgcccgggcttcggcgtggccagaccaggaactgaaacatcagacgtggtgtgcaagccctgtgccccggggacgttctccaacacgacttcatccacggatatttgcaggccccaccagatctgtaacgtggtggccatccctgggaatgcaagcatggatgcagtctgcacgtccacgtcccccacccggagtatggccccaggggcagtacacttaccccagccagtgtccacacgatcccaacacacgcagccaactccagaacccagcactgctccaagcacctccttcctgctcccaatgggccccagccccccagctgaagggagcactggcgacaccggtgagcccaaatcttctgacaaaactcacacatgcccaccgtgcccagcacctgaagccgcgggtgcaccgtcagtcttcctcttccccccaaaacccaaggacaccctcatgatctcccggacccctgaggtcacatgcgtggtggtggacgtgagccacgaagaccctgaggtcaagttcaactggtacgtggacggcgtggaggtgcataatgccaagacaaagccgcgggaggagcagtacaacagcacgtaccgtgtggtcagcgtcctcaccgtcctgcaccaggactggctgaatggcaaggcgtacgcgtgcgcggtctccaacaaagccctcccagcccccatcgagaaaaccatctccaaagccaaagggcagccccgagaaccacaggtgtacaccctgcccccatcccgggatgagctgaccaagaaccaggtcagcctgacctgcctggtcaaaggcttctatccaagcgacatcgccgtggagtgggagagcaatgggcagccggagaacaactacaagaccacgcctcccgtgctggactccgacggctccttcttcctctacagcaagctcaccgtggacaagagcaggtggcagcaggggaacgtcttctcatgctccgtgatgcatgaggctctgcacaaccactacacgcagaagagcctctccctgtctccgggtcagaggcacaacaattcttccctgaatacaagaactcagaaagcacgtcattctccgaattctgaagttcaattgttagagtctggtggcggtcttgttcagcctggtggttctttacgtctttcttgcgctgcttccggattcactttctctaattacaatatgtattgggttcgccaagctcctggtaaaggtttggagtgggtttcttatatctctccttctggtggcatgactaagtatgctgactccgttaaaggtcgcttcactatctctagagacaactctaagaatactctctacttgcagatgaacagcttaagggctgaggacacggccgtatattactgtgcgaggaggggagtgctggggtactacggtatggacgtctggggccaagggacaatggtcaccgtctcaagcggtggcggcggttcggggggtggcggaagtggaggtggagggagtcaagacatccagatgacccagtctccatcctccctgtctgcatctgtaggagacagagtcaccatcacttgccgggcaagtcagagcattagcagctatttaaattggtatcagcagaaaccagggaaagcccctaagctcctgatctatgctgcatccagtttgcaaagtggggtcccatcaaggttcagtggcagtggatctgggacagatttcactctcaccatcagcagtctgcaacctgaagattttgcaacttactactgtcaacagagttacagtaccccgtacacttttggccaggggaccaagctggagatcaaatgagcggccgcctcgagtctagagggccctattctatagtgtcacctaaatgctag

SEQ ID NO: 713 - DNA, 2294 bp, Artificial Sequence
  Made in a lab
aagcttgccgccatggattttcaagtgcagattttcagcttcctgctaatcagtgcttcagtcataatgtcgcgaggattgcccgcccaggtggcatttacaccctacgccccggagcccgggagcacatgccggctcagagaatactatgaccagacagctcagatgtgctgcagcaaatgctcgccgggccaacatgcaaaagtcttctgtaccaagacctcggacaccgtgtgtgactcctgtgaggacagcacatacacccagctctggaactgggttcccgagtgcttgagctgtggctcccgctgtagctctgaccaggtggaaactcaagcctgcactcgggaacagaaccgcatctgcacctgcaggcccggctggtactgcgcgctgagcaagcaggaggggtgccggctgtgcgcgccgctgcgcaagtgccgcccgggcttcggcgtggccagaccaggaactgaaacatcagacgtggtgtgcaagccctgtgccccggggacgttctccaacacgacttcatccacggatatttgcaggccccaccagatctgtaacgtggtggccatccctgggaatgcaagcatggatgcagtctgcacgtccacgtcccccacccggagtatggccccaggggcagtacacttaccccagccagtgtccacacgatcccaacacacgcagccaactccagaacccagcactgctccaagcacctccttcctgctcccaatgggccccagccccccagctgaagggagcactggcgacaccggtgagcccaaatcttctgacaaaactcacacatgcccaccgtgcccagcacctgaagccgcgggtgcaccgtcagtcttcctcttccccccaaaacccaaggacaccctcatgatctcccggacccctgaggtcacatgcgtggtggtggacgtgagccacgaagaccctgaggtcaagttcaactggtacgtggacggcgtggaggtgcataatgccaagacaaagccgcgggaggagcagtacaacagcacgtaccgtgtggtcagcgtcctcaccgtcctgcaccaggactggctgaatggcaaggcgtacgcgtgcgcggtctccaacaaagccctcccagcccccatcgagaaaaccatctccaaagccaaagggcagccccgagaaccacaggtgtacaccctgcccccatcccgggatgagctgaccaagaaccaggtcagcctgacctgcctggtcaaaggcttctatccaagcgacatcgccgtggagtgggagagcaatgggcagccggagaacaactacaagaccacgcctcccgtgctggactccgacggctccttcttcctctacagcaagctcaccgtggacaagagcaggtggcagcaggggaacgtcttctcatgctccgtgatgcatgaggctctgcacaaccactacacgcagaagagcctctccctgtctccgggtcagaggcacaacaattcttccctgaatacaagaactcagaaagcacgtcattctccgaattctgaagttcaattgttagagtctggtggcggtcttgttcagcctggtggttctttacgtctttcttgcgctgcttccggattcactttctctctttactctatgaattgggttcgccaagctcctggtaaaggtttggagtgggtttcttctatctcttcttctggtggcgctactctttatgctgactccgttaaaggtcgcttcactatctctagagacaactctaagaatactctctacttgcagatgaacagcttaagggctgaggacacggccgtgtattactgtgcgagagatcttataagtagtggttattaccctgatgcttttgatatctggggccaagggacaatggtcaccgtctcaagcggtggcggcggttcggggggtggcggaagtggaggtggagggagtcaagatatccagatgacccagtctccaggcaccctgtctttgtctccaggggaaagagccaccctctcctgcagggccagtcagagtgttagcagcagctacttagcctggtaccagcagaaacctggccaggctcccaggctcctcatctatggtgcgtctaatagggtcactggcatccccgacaggttcagtggcagtgggtctgggacagacttcactctcaccatttccagactcgagcctgaagattctgcagtatattactgtcaccaatatggtagccagtacacttttggcccggggaccaagctggagatcaaatgagcggccgc

SEQ ID NO: 714 - DNA, 2308 bp, Artificial Sequence
  Made in a lab
agcttgccgccatggattttcaagtgcagattttcagcttcctgctaatcagtgcttcagtcataatgtcgcgaggattgcccgcccaggtggcatttacaccctacgccccggagcccgggagcacatgccggctcagagaatactatgaccagacagctcagatgtgctgcagcaaatgctcgccgggccaacatgcaaaagtcttctgtaccaagacctcggacaccgtgtgtgactcctgtgaggacagcacatacacccagctctggaactgggttcccgagtgcttgagctgtggctcccgctgtagctctgaccaggtggaaactcaagcctgcactcgggaacagaaccgcatctgcacctgcaggcccggctggtactgcgcgctgagcaagcaggaggggtgccggctgtgcgcgccgctgcgcaagtgccgcccgggcttcggcgtggccagaccaggaactgaaacatcagacgtggtgtgcaagccctgtgccccggggacgttctccaacacgacttcatccacggatatttgcaggccccaccagatctgtaacgtggtggccatccctgggaatgcaagcatggatgcagtctgcacgtccacgtcccccacccggagtatggccccaggggcagtacacttaccccagccagtgtccacacgatcccaacacacgcagccaactccagaacccagcactgctccaagcacctccttcctgctcccaatgggccccagccccccagctgaagggagcactggcgacaccggtgagcccaaatcttctgacaaaactcacacatgcccaccgtgcccagcacctgaagccgcgggtgcaccgtcagtcttcctcttccccccaaaacccaaggacaccctcatgatctcccggacccctgaggtcacatgcgtggtggtggacgtgagccacgaagaccctgaggtcaagttcaactggtacgtggacggcgtggaggtgcataatgccaagacaaagccgcgggaggagcagtacaacagcacgtaccgtgtggtcagcgtcctcaccgtcctgcaccaggactggctgaatggcaaggcgtacgcgtgcgcggtctccaacaaagccctcccagcccccatcgagaaaaccatctccaaagccaaagggcagccccgagaaccacaggtgtacaccctgcccccatcccgggatgagctgaccaagaaccaggtcagcctgacctgcctggtcaaaggcttctatccaagcgacatcgccgtggagtgggagagcaatgggcagccggagaacaactacaagaccacgcctcccgtgctggactccgacggctccttcttcctctacagcaagctcaccgtggacaagagcaggtggcagcaggggaacgtcttctcatgctccgtgatgcatgaggctctgcacaaccactacacgcagaagagcctctccctgtctccgggtcagaggcacaacaattcttccctgaatacaagaactcagaaagcacgtcattctccgaattctgaagttcaattgttagagtctggtggcggtcttgttcagcctggtggttctttacgtctttcttgcgctgcttccggattcactttctctcagtacatgatgcattgggttcgccaagctcctggtaaaggtttggagtgggtttcttctatctcttcttctggtggctggacttcttatgctgactccgttaaaggtagcttcactatctctagagacaactctaagaatactctctacttgcagatgaacagcttaagggctgaggacacggccgtgtattactgtgcgagaccgttagccttgggatacgatttttggagtggttatcaagccgccggctttgactactggggccagggaaccctggtcaccgtctcaagcggtggcggcggttcggggggtggcggaagtggaggtggagggagtcaagacatccagatgacccagtctccatcatctctgtctgcatctgtaggagaccgagtcaccatctcttgccaggcgagtcaacacattagcaactttttaaattggtatcagcagaaaccggggaaagcccctaaactcctgatctacgatacatccaatttgcgatcaggggtcccatcacggttcagtgggagtggctctgggacagattttaccttcaccatcagttccctgcagcctgaagatattgcaacatattactgtcaacagtatgataatttccctctcactttcggcggagggaccaaggtggagatcaaatgagcggccgc

SEQ ID NO: 715 - DNA, 2288 bp, Artificial Sequence
  Made in a lab
aagcttgccgccatggattttcaagtgcagattttcagcttcctgctaatcagtgcttcagtcataatgtcgcgaggattgcccgcccaggtggcatttacaccctacgccccggagcccgggagcacatgccggctcagagaatactatgaccagacagctcagatgtgctgcagcaaatgctcgccgggccaacatgcaaaagtcttctgtaccaagacctcggacaccgtgtgtgactcctgtgaggacagcacatacacccagctctggaactgggttcccgagtgcttgagctgtggctcccgctgtagctctgaccaggtggaaactcaagcctgcactcgggaacagaaccgcatctgcacctgcaggcccggctggtactgcgcgctgagcaagcaggaggggtgccggctgtgcgcgccgctgcgcaagtgccgcccgggcttcggcgtggccagaccaggaactgaaacatcagacgtggtgtgcaagccctgtgccccggggacgttctccaacacgacttcatccacggatatttgcaggccccaccagatctgtaacgtggtggccatccctgggaatgcaagcatggatgcagtctgcacgtccacgtcccccacccggagtatggccccaggggcagtacacttaccccagccagtgtccacacgatcccaacacacgcagccaactccagaacccagcactgctccaagcacctccttcctgctcccaatgggccccagccccccagctgaagggagcactggcgacaccggtgagcccaaatcttctgacaaaactcacacatgcccaccgtgcccagcacctgaagccgcgggtgcaccgtcagtcttcctcttccccccaaaacccaaggacaccctcatgatctcccggacccctgaggtcacatgcgtggtggtggacgtgagccacgaagaccctgaggtcaagttcaactggtacgtggacggcgtggaggtgcataatgccaagacaaagccgcgggaggagcagtacaacagcacgtaccgtgtggtcagcgtcctcaccgtcctgcaccaggactggctgaatggcaaggcgtacgcgtgcgcggtctccaacaaagccctcccagcccccatcgagaaaaccatctccaaagccaaagggcagccccgagaaccacaggtgtacaccctgcccccatcccgggatgagctgaccaagaaccaggtcagcctgacctgcctggtcaaaggcttctatccaagcgacatcgccgtggagtgggagagcaatgggcagccggagaacaactacaagaccacgcctcccgtgctggactccgacggctccttcttcctctacagcaagctcaccgtggacaagagcaggtggcagcaggggaacgtcttctcatgctccgtgatgcatgaggctctgcacaaccactacacgcagaagagcctctccctgtctccgggtcagaggcacaacaattcttccctgaatacaagaactcagaaagcacgtcattctccgaattctgaagttcaattgttagagtctggtggcggtcttgttcagcctggtggttctttacgtctttcttgcgctgcttccggattcactttctcttggtactctatgatttgggttcgccaagctcctggtaaaggtttggagtgggtttcttctatcgttccttctggtggccttacttggtatgctgactccgttaaaggtcgcttcactatctctagagacaactctaagaatactctctacttgcagatgaacagcttaagggctgaggacacggccgtgtattactgtgcgagagatgtctacggtgactactactttgacaactggggccagggcaccctggtcaccgtctcaagcggtggcggcggttcggggggtggcggaagtggaggtggagggagtcagagcgaattgactcagccaccctcggtgtctgaagcccccgggcagagggtcaccatctcctgttctggaagcacctccaacatcggaaataatgctgtaatctggtaccagcagctcccaggaaaggctcccaaactcctcatctattatgatgatctgctgccctcaggggtctctgaccgattctctggctccaagtctggcacctcaggctccctggccatcagtgggctccagtctgaggatgaggctgactattactgtgcatcatgggatgacaacctgaatggtccgctgttcggcggagggaccaagctgaccgtcctatgagcggccgc

SEQ ID NO: 716 - DNA, 2282 bp, Artificial Sequence
  Made in a lab
aagcttgccgccatggattttcaagtgcagattttcagcttcctgctaatcagtgcttcagtcataatgtcgcgaggattgcccgcccaggtggcatttacaccctacgccccggagcccgggagcacatgccggctcagagaatactatgaccagacagctcagatgtgctgcagcaaatgctcgccgggccaacatgcaaaagtcttctgtaccaagacctcggacaccgtgtgtgactcctgtgaggacagcacatacacccagctctggaactgggttcccgagtgcttgagctgtggctcccgctgtagctctgaccaggtggaaactcaagcctgcactcgggaacagaaccgcatctgcacctgcaggcccggctggtactgcgcgctgagcaagcaggaggggtgccggctgtgcgcgccgctgcgcaagtgccgcccgggcttcggcgtggccagaccaggaactgaaacatcagacgtggtgtgcaagccctgtgccccggggacgttctccaacacgacttcatccacggatatttgcaggccccaccagatctgtaacgtggtggccatccctgggaatgcaagcatggatgcagtctgcacgtccacgtcccccacccggagtatggccccaggggcagtacacttaccccagccagtgtccacacgatcccaacacacgcagccaactccagaacccagcactgctccaagcacctccttcctgctcccaatgggccccagccccccagctgaagggagcactggcgacaccggtgagcccaaatcttctgacaaaactcacacatgcccaccgtgcccagcacctgaagccgcgggtgcaccgtcagtcttcctcttccccccaaaacccaaggacaccctcatgatctcccggacccctgaggtcacatgcgtggtggtggacgtgagccacgaagaccctgaggtcaagttcaactggtacgtggacggcgtggaggtgcataatgccaagacaaagccgcgggaggagcagtacaacagcacgtaccgtgtggtcagcgtcctcaccgtcctgcaccaggactggctgaatggcaaggcgtacgcgtgcgcggtctccaacaaagccctcccagcccccatcgagaaaaccatctccaaagccaaagggcagccccgagaaccacaggtgtacaccctgcccccatcccgggatgagctgaccaagaaccaggtcagcctgacctgcctggtcaaaggcttctatccaagcgacatcgccgtggagtgggagagcaatgggcagccggagaacaactacaagaccacgcctcccgtgctggactccgacggctccttcttcctctacagcaagctcaccgtggacaagagcaggtggcagcaggggaacgtcttctcatgctccgtgatgcatgaggctctgcacaaccactacacgcagaagagcctctccctgtctccgggtcagaggcacaacaattcttccctgaatacaagaactcagaaagcacgtcattctccgaattctgaagttcaattgttagagtctggtggcggtcttgttcagcctggtggttctttacgtctttcttgcgctgcttccggattcactttctcttattacaatatgacttgggttcgccaagctcctggtaaaggtttggagtgggtttcttctatctctccttctggtggccgtactggttatgctgactccgttaaaggtcgcttcactatctctagagacaactctaagaatactctctacttgcagatgaacagcttaagggctgaggacacggccgtgtattactgtgcgagagtaagtggcttctacgcagcgtttgattactggggccagggaaccctggtcaccgtctcaagcggtggcggcggttcggggggtggcggaagtggaggtggagggagtcaagacatccagatgacccagtctccttccaccctgtctgcatctgtaggagacagagtcaccatcacctgccgggccagtcagagtattagtagttggttggcctggtatcagcagaaaccagggaaagcccctaagctcctgatctatcaggcgtctactttagaaagtggggtcccatcaaggttcagcggcagtggatctgggacagatttcactctcactatcagcagcctacaacctgaagactttgcaacttattattgtcaacaggctaacagttttccgatcactttcggcggagggaccaaagtggagatcaactgagcggccgc

SEQ ID NO: 717 - DNA, 2285 bp, Artificial Sequence
  Made in a lab
aagcttgccgccatggattttcaagtgcagattttcagcttcctgctaatcagtgcttcagtcataatgtcgcgaggattgcccgcccaggtggcatttacaccctacgccccggagcccgggagcacatgccggctcagagaatactatgaccagacagctcagatgtgctgcagcaaatgctcgccgggccaacatgcaaaagtcttctgtaccaagacctcggacaccgtgtgtgactcctgtgaggacagcacatacacccagctctggaactgggttcccgagtgcttgagctgtggctcccgctgtagctctgaccaggtggaaactcaagcctgcactcgggaacagaaccgcatctgcacctgcaggcccggctggtactgcgcgctgagcaagcaggaggggtgccggctgtgcgcgccgctgcgcaagtgccgcccgggcttcggcgtggccagaccaggaactgaaacatcagacgtggtgtgcaagccctgtgccccggggacgttctccaacacgacttcatccacggatatttgcaggccccaccagatctgtaacgtggtggccatccctgggaatgcaagcatggatgcagtctgcacgtccacgtcccccacccggagtatggccccaggggcagtacacttaccccagccagtgtccacacgatcccaacacacgcagccaactccagaacccagcactgctccaagcacctccttcctgctcccaatgggccccagccccccagctgaagggagcactggcgacaccggtgagcccaaatcttctgacaaaactcacacatgcccaccgtgcccagcacctgaagccgcgggtgcaccgtcagtcttcctcttccccccaaaacccaaggacaccctcatgatctcccggacccctgaggtcacatgcgtggtggtggacgtgagccacgaagaccctgaggtcaagttcaactggtacgtggacggcgtggaggtgcataatgccaagacaaagccgcgggaggagcagtacaacagcacgtaccgtgtggtcagcgtcctcaccgtcctgcaccaggactggctgaatggcaaggcgtacgcgtgcgcggtctccaacaaagccctcccagcccccatcgagaaaaccatctccaaagccaaagggcagccccgagaaccacaggtgtacaccctgcccccatcccgggatgagctgaccaagaaccaggtcagcctgacctgcctggtcaaaggcttctatccaagcgacatcgccgtggagtgggagagcaatgggcagccggagaacaactacaagaccacgcctcccgtgctggactccgacggctccttcttcctctacagcaagctcaccgtggacaagagcaggtggcagcaggggaacgtcttctcatgctccgtgatgcatgaggctctgcacaaccactacacgcagaagagcctctccctgtctccgggtcagaggcacaacaattcttccctgaatacaagaactcagaaagcacgtcattctccgaattctgaagttcaattgttagagtctggtggcggtcttgttcagcctggtggttctttacgtctttcttgcgctgcttccggattcactttctcttggtactggatgacttgggttcgccaagctcctggtaaaggtttggagtgggtttcttctatccctccttctggtggccatacttcttatgctgactccgttaaaggtcgcttcactatctctagagacaactctaagaatactctctacttgcagatgaacagcttaagggctgaggacacggccgtgtattactgtgctaaaagcagtggctggtacgaggactactttgactactggggccagggaaccctggtcaccgtctcaagcggtggcggcggttcggggggtggcggaagtggaggtggagggagtcaagacatccagatgacccagtctccatcctccctgtctgcctctgtaggagacagagtcaccatcacttgccaggcgagtcaagatattaccaactatttaaattggtatctgcataaaccagggaaagcccctaagctcctgatctacgacgcatccaacttgcaaacaggggtcccatcaaggttcagtggaagtggatctgggacagattttactttcaccatcactagcctgcagcctgaagattttggaacatattactgtcaacagtatgatactttacatccctctttcggccctgggaccacagtggatatcaaatgagcggccgc

SEQ ID NO: 718 - DNA, 2300 bp, Artificial Sequence
  Made in a lab
aagcttgccgccatggattttcaagtgcagattttcagcttcctgctaatcagtgcttcagtcataatgtcgcgaggattgcccgcccaggtggcatttacaccctacgccccggagcccgggagcacatgccggctcagagaatactatgaccagacagctcagatgtgctgcagcaaatgctcgccgggccaacatgcaaaagtcttctgtaccaagacctcggacaccgtgtgtgactcctgtgaggacagcacatacacccagctctggaactgggttcccgagtgcttgagctgtggctcccgctgtagctctgaccaggtggaaactcaagcctgcactcgggaacagaaccgcatctgcacctgcaggcccggctggtactgcgcgctgagcaagcaggaggggtgccggctgtgcgcgccgctgcgcaagtgccgcccgggcttcggcgtggccagaccaggaactgaaacatcagacgtggtgtgcaagccctgtgccccggggacgttctccaacacgacttcatccacggatatttgcaggccccaccagatctgtaacgtggtggccatccctgggaatgcaagcatggatgcagtctgcacgtccacgtcccccacccggagtatggccccaggggcagtacacttaccccagccagtgtccacacgatcccaacacacgcagccaactccagaacccagcactgctccaagcacctccttcctgctcccaatgggccccagccccccagctgaagggagcactggcgacaccggtgagcccaaatcttctgacaaaactcacacatgcccaccgtgcccagcacctgaagccgcgggtgcaccgtcagtcttcctcttccccccaaaacccaaggacaccctcatgatctcccggacccctgaggtcacatgcgtggtggtggacgtgagccacgaagaccctgaggtcaagttcaactggtacgtggacggcgtggaggtgcataatgccaagacaaagccgcgggaggagcagtacaacagcacgtaccgtgtggtcagcgtcctcaccgtcctgcaccaggactggctgaatggcaaggcgtacgcgtgcgcggtctccaacaaagccctcccagcccccatcgagaaaaccatctccaaagccaaagggcagccccgagaaccacaggtgtacaccctgcccccatcccgggatgagctgaccaagaaccaggtcagcctgacctgcctggtcaaaggcttctatccaagcgacatcgccgtggagtgggagagcaatgggcagccggagaacaactacaagaccacgcctcccgtgctggactccgacggctccttcttcctctacagcaagctcaccgtggacaagagcaggtggcagcaggggaacgtcttctcatgctccgtgatgcatgaggctctgcacaaccactacacgcagaagagcctctccctgtctccgggtcagaggcacaacaattcttccctgaatacaagaactcagaaagcacgtcattctccgaattctgaagttcaattgttagagtctggtggcggtcttgttcagcctggtggttctttacgtctttcttgcgctgcttccggattcactttctctccttacgagatggcttgggttcgccaagctcctggtaaaggtttggagtgggtttctgttatcggtccttctggtggctatactgagtatgctgactccgttaaaggtcgcttcactatctctagagacaactctaagaatactctctacttgcagatgaacagcttaagggctgaggacacggccgtgtattactgtgcgagaggctacgatttttggagtggttattatgatgcttttgatatctggggccaagggacaatggtcaccgtctcaagcggtggcggcggttcggggggtggcggaagtggaggtggagggagtcagagcgctttgactcagccaccctccgcgtccgggtctcctggacaatcagtcaccatctcctgcactggaaccagcagtgacgttggtgtttatgactctgtctcctggtaccaacaacaccctggcaaggcccccaaactcatgatttacgatgtcagtgatcggccctcaggtgtttctaatcggttctctggctccaagtctggctacacggcctccctgaccatctctgcgctccaggctgaggacgaggctgattattattgcggctcatatcgagccagcagctcctatgtcttcgggactgggaccaaggtcaccgtcctatgagcggccgc

SEQ ID NO: 719 - DNA, 2282 bp, Artificial Sequence
  Made in a lab
aagcttgccgccatggattttcaagtgcagattttcagcttcctgctaatcagtgcttcagtcataatgtcgcgaggattgcccgcccaggtggcatttacaccctacgccccggagcccgggagcacatgccggctcagagaatactatgaccagacagctcagatgtgctgcagcaaatgctcgccgggccaacatgcaaaagtcttctgtaccaagacctcggacaccgtgtgtgactcctgtgaggacagcacatacacccagctctggaactgggttcccgagtgcttgagctgtggctcccgctgtagctctgaccaggtggaaactcaagcctgcactcgggaacagaaccgcatctgcacctgcaggcccggctggtactgcgcgctgagcaagcaggaggggtgccggctgtgcgcgccgctgcgcaagtgccgcccgggcttcggcgtggccagaccaggaactgaaacatcagacgtggtgtgcaagccctgtgccccggggacgttctccaacacgacttcatccacggatatttgcaggccccaccagatctgtaacgtggtggccatccctgggaatgcaagcatggatgcagtctgcacgtccacgtcccccacccggagtatggccccaggggcagtacacttaccccagccagtgtccacacgatcccaacacacgcagccaactccagaacccagcactgctccaagcacctccttcctgctcccaatgggccccagccccccagctgaagggagcactggcgacaccggtgagcccaaatcttctgacaaaactcacacatgcccaccgtgcccagcacctgaagccgcgggtgcaccgtcagtcttcctcttccccccaaaacccaaggacaccctcatgatctcccggacccctgaggtcacatgcgtggtggtggacgtgagccacgaagaccctgaggtcaagttcaactggtacgtggacggcgtggaggtgcataatgccaagacaaagccgcgggaggagcagtacaacagcacgtaccgtgtggtcagcgtcctcaccgtcctgcaccaggactggctgaatggcaaggcgtacgcgtgcgcggtctccaacaaagccctcccagcccccatcgagaaaaccatctccaaagccaaagggcagccccgagaaccacaggtgtacaccctgcccccatcccgggatgagctgaccaagaaccaggtcagcctgacctgcctggtcaaaggcttctatccaagcgacatcgccgtggagtgggagagcaatgggcagccggagaacaactacaagaccacgcctcccgtgctggactccgacggctccttcttcctctacagcaagctcaccgtggacaagagcaggtggcagcaggggaacgtcttctcatgctccgtgatgcatgaggctctgcacaaccactacacgcagaagagcctctccctgtctccgggtcagaggcacaacaattcttccctgaatacaagaactcagaaagcacgtcattctccgaattctgaagttcaattgttagagtctggtggcggtcttgttcagcctggtggttctttacgtctttcttgcgctgcttccggattcactttctcttcttactttatgggttgggttcgccaagctcctggtaaaggtttggagtgggtttcttctatctggccttctggtggcaatactacttatgctgactccgttaaaggtcgcttcactatctctagagacaactctaagaatactctctacttgcagatgaacagcttaagggctgaggacacggccgtgtattactgtgcgagacatgttggctggggacgctactttgactactggggccagggaaccctggtcaccgtctcaagcggtggcggcggttcggggggtggcggaagtggaggtggagggagtcaagacatccagatgacccagtctccatcctccctgtctgcatctgttggagacagagtcaccatcacttgccgggcaagtcagaacatttaccactatttacattggtatcagcagaaacccgggaaggcccctaaactcctgatctatgctgcatccactttggaaagtggggtcccatcaaggttcagtggcagtggatctgggacagatctcactctcaccatcaacagtctgcaacctgaagattttgcaacttattactgtcaacagacttacgatacccccctcactttcggcggagggagtaaggtggaggtcaaatgagcggccgc

SEQ ID NO: 720 - DNA, 2294 bp, Artificial Sequence
  Made in a lab
aagcttgccgccatggattttcaagtgcagattttcagcttcctgctaatcagtgcttcagtcataatgtcgcgaggattgcccgcccaggtggcatttacaccctacgccccggagcccgggagcacatgccggctcagagaatactatgaccagacagctcagatgtgctgcagcaaatgctcgccgggccaacatgcaaaagtcttctgtaccaagacctcggacaccgtgtgtgactcctgtgaggacagcacatacacccagctctggaactgggttcccgagtgcttgagctgtggctcccgctgtagctctgaccaggtggaaactcaagcctgcactcgggaacagaaccgcatctgcacctgcaggcccggctggtactgcgcgctgagcaagcaggaggggtgccggctgtgcgcgccgctgcgcaagtgccgcccgggcttcggcgtggccagaccaggaactgaaacatcagacgtggtgtgcaagccctgtgccccggggacgttctccaacacgacttcatccacggatatttgcaggccccaccagatctgtaacgtggtggccatccctgggaatgcaagcatggatgcagtctgcacgtccacgtcccccacccggagtatggccccaggggcagtacacttaccccagccagtgtccacacgatcccaacacacgcagccaactccagaacccagcactgctccaagcacctccttcctgctcccaatgggccccagccccccagctgaagggagcactggcgacaccggtgagcccaaatcttctgacaaaactcacacatgcccaccgtgcccagcacctgaagccgcgggtgcaccgtcagtcttcctcttccccccaaaacccaaggacaccctcatgatctcccggacccctgaggtcacatgcgtggtggtggacgtgagccacgaagaccctgaggtcaagttcaactggtacgtggacggcgtggaggtgcataatgccaagacaaagccgcgggaggagcagtacaacagcacgtaccgtgtggtcagcgtcctcaccgtcctgcaccaggactggctgaatggcaaggcgtacgcgtgcgcggtctccaacaaagccctcccagcccccatcgagaaaaccatctccaaagccaaagggcagccccgagaaccacaggtgtacaccctgcccccatcccgggatgagctgaccaagaaccaggtcagcctgacctgcctggtcaaaggcttctatccaagcgacatcgccgtggagtgggagagcaatgggcagccggagaacaactacaagaccacgcctcccgtgctggactccgacggctccttcttcctctacagcaagctcaccgtggacaagagcaggtggcagcaggggaacgtcttctcatgctccgtgatgcatgaggctctgcacaaccactacacgcagaagagcctctccctgtctccgggtcagaggcacaacaattcttccctgaatacaagaactcagaaagcacgtcattctccgaattctgaagttcaattgttagagtctggtggcggtcttgttcagcctggtggttctttacgtctttcttgcgctgcttccggattcactttctctgcttaccgtatgatttgggttcgccaagctcctggtaaaggtttggagtgggtttcttatatctcttcttctggtggccgtactgattatgctgactccgttaaaggtcgcttcactatctctagagacaactctaagaatactctctacttgcagatgaacagcttaagggctgaggacacagccgtgtattactgtaccacaggagggttacgatattttgactggttagccccctccatggactactggggccagggaaccctggtcaccgtctcaagcggtggcggcggttcggggggtggcggaagtggaggtggagggagtcagagcgctttgactcagccaccctcagtgtccgtgtccccaggacagacagccagcatcacctgttctggagataaattgggggaaaaatttgcttcttggtatcagcagaggccaggccagtcccctatactggtcatctatcaagattccaagcggccctccgggatccctgagcgattctctggctccaactctgggaacacagccactctgaccatcagcgggacccagactatggatgaggctgactattactgtcaggcgtggggcggcagcactgcatacgtcttcggcagtgggaccaaggtcaccgtcctatgagcggccgc

SEQ ID NO: 721 - DNA, 2279 bp, Artificial Sequence
  Made in a lab
aagcttgccgccatggattttcaagtgcagattttcagcttcctgctaatcagtgcttcagtcataatgtcgcgaggattgcccgcccaggtggcatttacaccctacgccccggagcccgggagcacatgccggctcagagaatactatgaccagacagctcagatgtgctgcagcaaatgctcgccgggccaacatgcaaaagtcttctgtaccaagacctcggacaccgtgtgtgactcctgtgaggacagcacatacacccagctctggaactgggttcccgagtgcttgagctgtggctcccgctgtagctctgaccaggtggaaactcaagcctgcactcgggaacagaaccgcatctgcacctgcaggcccggctggtactgcgcgctgagcaagcaggaggggtgccggctgtgcgcgccgctgcgcaagtgccgcccgggcttcggcgtggccagaccaggaactgaaacatcagacgtggtgtgcaagccctgtgccccggggacgttctccaacacgacttcatccacggatatttgcaggccccaccagatctgtaacgtggtggccatccctgggaatgcaagcatggatgcagtctgcacgtccacgtcccccacccggagtatggccccaggggcagtacacttaccccagccagtgtccacacgatcccaacacacgcagccaactccagaacccagcactgctccaagcacctccttcctgctcccaatgggccccagccccccagctgaagggagcactggcgacaccggtgagcccaaatcttctgacaaaactcacacatgcccaccgtgcccagcacctgaagccgcgggtgcaccgtcagtcttcctcttccccccaaaacccaaggacaccctcatgatctcccggacccctgaggtcacatgcgtggtggtggacgtgagccacgaagaccctgaggtcaagttcaactggtacgtggacggcgtggaggtgcataatgccaagacaaagccgcgggaggagcagtacaacagcacgtaccgtgtggtcagcgtcctcaccgtcctgcaccaggactggctgaatggcaaggcgtacgcgtgcgcggtctccaacaaagccctcccagcccccatcgagaaaaccatctccaaagccaaagggcagccccgagaaccacaggtgtacaccctgcccccatcccgggatgagctgaccaagaaccaggtcagcctgacctgcctggtcaaaggcttctatccaagcgacatcgccgtggagtgggagagcaatgggcagccggagaacaactacaagaccacgcctcccgtgctggactccgacggctccttcttcctctacagcaagctcaccgtggacaagagcaggtggcagcaggggaacgtcttctcatgctccgtgatgcatgaggctctgcacaaccactacacgcagaagagcctctccctgtctccgggtcagaggcacaacaattcttccctgaatacaagaactcagaaagcacgtcattctccgaattctgaagttcaattgttagagtctggtggcggtcttgttcagcctggtggttctttacgtctttcttgcgctgcttccggattcactttctctgcttactctatggtttgggttcgccaagctcctggtaaaggtttggagtgggtttcttatatctatccttctggtggcattactacttatgctgactccgttaaaggtcgcttcactatctctagagacaactctaagaatactctctacttgcagatgaacagcttaagggctgaggacacggctgtgtattactgtgcgagagagggccaggtttttgatatctggggccaagggaccacggtcaccgtctcaagcggtggcggcggttcggggggtggcggaagtggaggtggagggagtcaagacatccagatgacccagtctccagccaccctgtctttgtctccaggggaaagagccaccctctcctgcagggccagtcagagtgttaccacctacttagcctggtaccaacagagacctggccaggctcccaggctcctcatctatgatgcatccaacagggccactggcatcccagccaggttcagtggcagtgggtctgggacagacttcactctcaccatcagcagcgtagagcctgaagattatgcagtttattactgtcagcagcgtagcaactggcctccttcgatcaccttcggccaagggacacgactggagagtaagtgagcggccgc

SEQ ID NO: 722 - DNA, 2285 bp, Artificial Sequence
  Made in a lab
aagcttgccgccatggattttcaagtgcagattttcagcttcctgctaatcagtgcttcagtcataatgtcgcgaggattgcccgcccaggtggcatttacaccctacgccccggagcccgggagcacatgccggctcagagaatactatgaccagacagctcagatgtgctgcagcaaatgctcgccgggccaacatgcaaaagtcttctgtaccaagacctcggacaccgtgtgtgactcctgtgaggacagcacatacacccagctctggaactgggttcccgagtgcttgagctgtggctcccgctgtagctctgaccaggtggaaactcaagcctgcactcgggaacagaaccgcatctgcacctgcaggcccggctggtactgcgcgctgagcaagcaggaggggtgccggctgtgcgcgccgctgcgcaagtgccgcccgggcttcggcgtggccagaccaggaactgaaacatcagacgtggtgtgcaagccctgtgccccggggacgttctccaacacgacttcatccacggatatttgcaggccccaccagatctgtaacgtggtggccatccctgggaatgcaagcatggatgcagtctgcacgtccacgtcccccacccggagtatggccccaggggcagtacacttaccccagccagtgtccacacgatcccaacacacgcagccaactccagaacccagcactgctccaagcacctccttcctgctcccaatgggccccagccccccagctgaagggagcactggcgacaccggtgagcccaaatcttctgacaaaactcacacatgcccaccgtgcccagcacctgaagccgcgggtgcaccgtcagtcttcctcttccccccaaaacccaaggacaccctcatgatctcccggacccctgaggtcacatgcgtggtggtggacgtgagccacgaagaccctgaggtcaagttcaactggtacgtggacggcgtggaggtgcataatgccaagacaaagccgcgggaggagcagtacaacagcacgtaccgtgtggtcagcgtcctcaccgtcctgcaccaggactggctgaatggcaaggcgtacgcgtgcgcggtctccaacaaagccctcccagcccccatcgagaaaaccatctccaaagccaaagggcagccccgagaaccacaggtgtacaccctgcccccatcccgggatgagctgaccaagaaccaggtcagcctgacctgcctggtcaaaggcttctatccaagcgacatcgccgtggagtgggagagcaatgggcagccggagaacaactacaagaccacgcctcccgtgctggactccgacggctccttcttcctctacagcaagctcaccgtggacaagagcaggtggcagcaggggaacgtcttctcatgctccgtgatgcatgaggctctgcacaaccactacacgcagaagagcctctccctgtctccgggtcagaggcacaacaattcttccctgaatacaagaactcagaaagcacgtcattctccgaattctgaagttcaattgttagagtctggtggcggtcttgttcagcctggtggttctttacgtctttcttgcgctgcttccggattcactttctctaattacgctatgggttgggttcgccaagctcctggtaaaggtttggagtgggtttctcgtatcgttccttctggtggcatgacttcttatgctgactccgttaaaggtcgcttcactatctctagagacaactctaagaatactctctacttgcagatgaacagcttaagggctgaggacacagccgtgtattactgtaccacagatgatttttggtccggtatggacgtctggggccaagggaccacggtcaccgtctcaagcggtggcggcggttcggggggtggcggaagtggaggtggagggagtcagagcgctttgactcagcctgcctccgtgtctgggtctcctggacagtcgatcaccatctcctgcactggaaccagcagtgatgttgggagttataaccttgtctcctggtaccaacagcacccaggcaaagcccccaaagtcatgatttatgagggcagtaagcggccctcaggggtttctaatcgcttctctggctccaagtctggcaacacggcctccctgacaatctctgggctccaggctgaggacgaggctgattattactgctgctcatatgcaggtcgtagcacttatgtcttcggaactgggaccaaggtcaccgtcctatgagcggccgc

SEQ ID NO: 723 - DNA, 2285 bp, Artificial Sequence
  Made in a lab
aagcttgccgccatggattttcaagtgcagattttcagcttcctgctaatcagtgcttcagtcataatgtcgcgaggattgcccgcccaggtggcatttacaccctacgccccggagcccgggagcacatgccggctcagagaatactatgaccagacagctcagatgtgctgcagcaaatgctcgccgggccaacatgcaaaagtcttctgtaccaagacctcggacaccgtgtgtgactcctgtgaggacagcacatacacccagctctggaactgggttcccgagtgcttgagctgtggctcccgctgtagctctgaccaggtggaaactcaagcctgcactcgggaacagaaccgcatctgcacctgcaggcccggctggtactgcgcgctgagcaagcaggaggggtgccggctgtgcgcgccgctgcgcaagtgccgcccgggcttcggcgtggccagaccaggaactgaaacatcagacgtggtgtgcaagccctgtgccccggggacgttctccaacacgacttcatccacggatatttgcaggccccaccagatctgtaacgtggtggccatccctgggaatgcaagcatggatgcagtctgcacgtccacgtcccccacccggagtatggccccaggggcagtacacttaccccagccagtgtccacacgatcccaacacacgcagccaactccagaacccagcactgctccaagcacctccttcctgctcccaatgggccccagccccccagctgaagggagcactggcgacaccggtgagcccaaatcttctgacaaaactcacacatgcccaccgtgcccagcacctgaagccgcgggtgcaccgtcagtcttcctcttccccccaaaacccaaggacaccctcatgatctcccggacccctgaggtcacatgcgtggtggtggacgtgagccacgaagaccctgaggtcaagttcaactggtacgtggacggcgtggaggtgcataatgccaagacaaagccgcgggaggagcagtacaacagcacgtaccgtgtggtcagcgtcctcaccgtcctgcaccaggactggctgaatggcaaggcgtacgcgtgcgcggtctccaacaaagccctcccagcccccatcgagaaaaccatctccaaagccaaagggcagccccgagaaccacaggtgtacaccctgcccccatcccgggatgagctgaccaagaaccaggtcagcctgacctgcctggtcaaaggcttctatccaagcgacatcgccgtggagtgggagagcaatgggcagccggagaacaactacaagaccacgcctcccgtgctggactccgacggctccttcttcctctacagcaagctcaccgtggacaagagcaggtggcagcaggggaacgtcttctcatgctccgtgatgcatgaggctctgcacaaccactacacgcagaagagcctctccctgtctccgggtcagaggcacaacaattcttccctgaatacaagaactcagaaagcacgtcattctccgaattctgaagttcaattgttagagtctggtggcggtcttgttcagcctggtggttcttcacgtctttcttgcgctgcttccggattcactttctctctttacaatatgcagtgggttcgccaagctcctggtaaaggtttggagtgggtttctggtatctctctttctggtggcaagactttttatgctgactccgttaaaggtcgcttcactatctctagagacaactctaagaatactctctacttgcagatgaacagcttaagggctgaggacacggccgtgtattactgtgcgagagattacggggtggctacgctagatgcttttgatatctggggccaagggacaatggtcaccgtctcaagcggtggcggcggttcggggggtggcggaagtggaggtggagggagtcagagcgaattgactcagacaccctctgtgtccgtgtccccaggacagacagccagcatcacctgctctggaaatagattggaggataagtatgttcactggtatcagcagaagccaggccagtcccctgtgttggtcctctatcaagacaacaagcggccctccgggatccctgagcgattctctggctccaactctgggaacacagccactctgaccatcagcgagacccagactttggatgaggctgactattactgtcaggcgtgggacagcagcactcgtgaggttttcggcggagggaccaagctgaccgtcctatgagcggccgc

SEQ ID NO: 724 - DNA, 2306 bp, Artificial Sequence
  Made in a lab
aagcttgccgccatggattttcaagtgcagattttcagcttcctgctaatcagtgcttcagtcataatgtcgcgaggattgcccgcccaggtggcatttacaccctacgccccggagcccgggagcacatgccggctcagagaatactatgaccagacagctcagatgtgctgcagcaaatgctcgccgggccaacatgcaaaagtcttctgtaccaagacctcggacaccgtgtgtgactcctgtgaggacagcacatacacccagctctggaactgggttcccgagtgcttgagctgtggctcccgctgtagctctgaccaggtggaaactcaagcctgcactcgggaacagaaccgcatctgcacctgcaggcccggctggtactgcgcgctgagcaagcaggaggggtgccggctgtgcgcgccgctgcgcaagtgccgcccgggcttcggcgtggccagaccaggaactgaaacatcagacgtggtgtgcaagccctgtgccccggggacgttctccaacacgacttcatccacggatatttgcaggccccaccagatctgtaacgtggtggccatccctgggaatgcaagcatggatgcagtctgcacgtccacgtcccccacccggagtatggccccaggggcagtacacttaccccagccagtgtccacacgatcccaacacacgcagccaactccagaacccagcactgctccaagcacctccttcctgctcccaatgggccccagccccccagctgaagggagcactggcgacaccggtgagcccaaatcttctgacaaaactcacacatgcccaccgtgcccagcacctgaagccgcgggtgcaccgtcagtcttcctcttccccccaaaacccaaggacaccctcatgatctcccggacccctgaggtcacatgcgtggtggtggacgtgagccacgaagaccctgaggtcaagttcaactggtacgtggacggcgtggaggtgcataatgccaagacaaagccgcgggaggagcagtacaacagcacgtaccgtgtggtcagcgtcctcaccgtcctgcaccaggactggctgaatggcaaggcgtacgcgtgcgcggtctccaacaaagccctcccagcccccatcgagaaaaccatctccaaagccaaagggcagccccgagaaccacaggtgtacaccctgcccccatcccgggatgagctgaccaagaaccaggtcagcctgacctgcctggtcaaaggcttctatccaagcgacatcgccgtggagtgggagagcaatgggcagccggagaacaactacaagaccacgcctcccgtgctggactccgacggctccttcttcctctacagcaagctcaccgtggacaagagcaggtggcagcaggggaacgtcttctcatgctccgtgatgcatgaggctctgcacaaccactacacgcagaagagcctctccctgtctccgggtcagaggcacaacaattcttccctgaatacaagaactcagaaagcacgtcattctccgaattctgaagttcaattgttagagtctggtggcggtcttgttcagcctggtggttctttacgtctttcttgcgctgcttccggattcactttctctgcttacactatgcattgggttcgccaagctcctggtaaaggtttggagtgggtttcttctatctatccttctggtggcactactccttatgctgactccgttaaaggtcgcttcactatctctagagacaactctaagaatactctctacttgcagatgaacagcttaagggctgaggacacagccacatattactgtgccagagtggtgaatatcgatttttggagtggttacaatatgcggagtgcttttgatatctggggccaagggacaatggtcaccgtctcaagcggtggcggcggttcagggggtggcggaagtggaggtggagggagtcaagacatccagatgacccagtctccatcctccgtgtctgcgtctgtaggagacacagtcaccatcacttgtcgggcgagtcagggtgttagcgactggttagcctggtatcagcagaagccagggaaagcccctaacctcctaatctatggtgcatccagtctgcaaactggggtcccatcacggttcagcggcggtggatccgggacagatttcactctcaccatcagtagcctgcagcctgaggattttgcaacttactattgtcaacaggctcacagtttccctttcactttcggcggagggaccagggtggaaatcaaatgagcggccgc

SEQ ID NO: 725 - DNA, 2383 bp, Artificial Sequence
  Made in a lab
tactggcttatcgaattaatacgactcactatagggagacccaagcttgccgccatggattttcaagtgcagattttcagcttcctgctaatcagtgcttcagtcataatgtcgcgaggattgcccgcccaggtggcatttacaccctacgccccggagcccgggagcacatgccggctcagagaatactatgaccagacagctcagatgtgctgcagcaaatgctcgccgggccaacatgcaaaagtcttctgtaccaagacctcggacaccgtgtgtgactcctgtgaggacagcacatacacccagctctggaactgggttcccgagtgcttgagctgtggctcccgctgtagctctgaccaggtggaaactcaagcctgcactcgggaacagaaccgcatctgcacctgcaggcccggctggtactgcgcgctgagcaagcaggaggggtgccggctgtgcgcgccgctgcgcaagtgccgcccgggcttcggcgtggccagaccaggaactgaaacatcagacgtggtgtgcaagccctgtgccccggggacgttctccaacacgacttcatccacggatatttgcaggccccaccagatctgtaacgtggtggccatccctgggaatgcaagcatggatgcagtctgcacgtccacgtcccccacccggagtatggccccaggggcagtacacttaccccagccagtgtccacacgatcccaacacacgcagccaactccagaacccagcactgctccaagcacctccttcctgctcccaatgggccccagccccccagctgaagggagcactggcgacaccggtgagcccaaatcttctgacaaaactcacacatgcccaccgtgcccagcacctgaagccgcgggtgcaccgtcagtcttcctcttccccccaaaacccaaggacaccctcatgatctcccggacccctgaggtcacatgcgtggtggtggacgtgagccacgaagaccctgaggtcaagttcaactggtacgtggacggcgtggaggtgcataatgccaagacaaagccgcgggaggagcagtacaacagcacgtaccgtgtggtcagcgtcctcaccgtcctgcaccaggactggctgaatggcaaggcgtacgcgtgcgcggtctccaacaaagccctcccagcccccatcgagaaaaccatctccaaagccaaagggcagccccgagaaccacaggtgtacaccctgcccccatcccgggatgagctgaccaagaaccaggtcagcctgacctgcctggtcaaaggcttctatccaagcgacatcgccgtggagtgggagagcaatgggcagccggagaacaactacaagaccacgcctcccgtgctggactccgacggctccttcttcctctacagcaagctcaccgtggacaagagcaggtggcagcaggggaacgtcttctcatgctccgtgatgcatgaggctctgcacaaccactacacgcagaagagcctctccctgtctccgggtcagaggcacaacaattcttccctgaatacaagaactcagaaagcacgtcattctccgaattctgaagttcaattgttagagtctggtggcggtcttgttcagcctggtggttctttacgtctttcttgcgctgcttccggattcactttctctgattaccttatgggttgggttcgccaagctcctggtaaaggtttggagtgggtttctgttatctcttcttctggtggccctactgcttatgctgactccgttaaaggtcgcttcactatctctagagacaactctaagaatactctctacttgcagatgaacagcttaagggctgaggacacggccgtgtattactgtgcgagagtggggcttgactacgggatactgggtgcttttgatatctggggccaagggacaatggtcaccgtctcaagcggtggcggcggttcggggggtggcggaagtggaggtggagggagtcaagacatccagatgacccagtctccagccaccctgtctgtgtctccaggggaaagagccaccctctcctgcagggccagtcagaatattaacacccacttagcctggtaccagcagaaacctggccaggctcccaggctcctcatctttggtgcatccaccagggccactggtatcccagccaggttcagtggcagtgggtctgggacagagttcactctcaccatcagcagcctgcagtctgaagattttacagtttattactgtcagcagtatggtagctcacttacgtggacgttcggccaagggaccaaggtggaaatcaaatgagcggccgcctcgagtctagagggccctattctatagtgtcacctaaatgctagag

SEQ ID NO: 726 - DNA, 2412 bp, Artificial Sequence
  Made in a lab
agaaaaaaactggcttatggcttatcgaaattaatacgactcactatagggagacccaagcttgccgccatggattttcaagtgcagattttcagcttcctgctaatcagtgcttcagtcataatgtcgcgaggattgcccgcccaggtggcatttacaccctacgccccggagcccgggagcacatgccggctcagagaatactatgaccagacagctcagatgtgctgcagcaaatgctcgccgggccaacatgcaaaagtcttctgtaccaagacctcggacaccgtgtgtgactcctgtgaggacagcacatacacccagctctggaactgggttcccgagtgcttgagctgtggctcccgctgtagctctgaccaggtggaaactcaagcctgcactcgggaacagaaccgcatctgcacctgcaggcccggctggtactgcgcgctgagcaagcaggaggggtgccggctgtgcgcgccgctgcgcaagtgccgcccgggcttcggcgtggccagaccaggaactgaaacatcagacgtggtgtgcaagccctgtgccccggggacgttctccaacacgacttcatccacggatatttgcaggccccaccagatctgtaacgtggtggccatccctgggaatgcaagcatggatgcagtctgcacgtccacgtcccccacccggagtatggccccaggggcagtacacttaccccagccagtgtccacacgatcccaacacacgcagccaactccagaacccagcactgctccaagcacctccttcctgctcccaatgggccccagccccccagctgaagggagcactggcgacaccggtgagcccaaatcttctgacaaaactcacacatgcccaccgtgcccagcacctgaagccgcgggtgcaccgtcagtcttcctcttccccccaaaacccaaggacaccctcatgatctcccggacccctgaggtcacatgcgtggtggtggacgtgagccacgaagaccctgaggtcaagttcaactggtacgtggacggcgtggaggtgcataatgccaagacaaagccgcgggaggagcagtacaacagcacgtaccgtgtggtcagcgtcctcaccgtcctgcaccaggactggctgaatggcaaggcgtacgcgtgcgcggtctccaacaaagccctcccagcccccatcgagaaaaccatctccaaagccaaagggcagccccgagaaccacaggtgtacaccctgcccccatcccgggatgagctgaccaagaaccaggtcagcctgacctgcctggtcaaaggcttctatccaagcgacatcgccgtggagtgggagagcaatgggcagccggagaacaactacaagaccacgcctcccgtgctggactccgacggctccttcttcctctacagcaagctcaccgtggacaagagcaggtggcagcaggggaacgtcttctcatgctccgtgatgcatgaggctctgcacaaccactacacgcagaagagcctctccctgtctccgggtcagaggcacaacaattcttccctgaatacaagaactcagaaagcacgtcattctccgaattctgaagttcaattgttagagtctggtggcggtcttgttcagcctggtggttctttacgtctttcttgcgctgcttccggattcactttctctgagtacggtatgtcttgggttcgccaagctcctggtaaaggtttggagtgggtttcttctatccgttcttctggtggctggactaagtatgctgactccgttaaaggtcgcttcactatctctagagacaactctaagaatactctctacttgcagatgaacagcttaagggctgaggacacggccgtgtattactgtgcgaaaggcctaggggccactagtggggaatttgactattggggccagggaaccctggtcaccgtctcaagcggtggcggcggttcggggggtggcggaagtggaggtggagggagtcaagacatccagatgacccagtctccaggcaccctgtctttgtctccaggggaaagagccaccctctcctgcagggccagtcagagtgttagcggcaactacttagcctggtaccagcagaaacttggccaggctcccaggctcctcatctatggtgcatccagcagggccactggcaccccagacaggttcagtggcagtgggtctgggacagaattcactctcacaatcagcagcctgcagcctgaagattttgcaacttattactgtctacagcataatagttatccgctcactttcggcggagggaccaaggtggagatcaaatgagcggccgcctcgagtctagagggccctattctatagtgtcacctaaatgctagagcttcgcgattctgtccctaa

SEQ ID NO: 727 - DNA, 2288 bp, Artificial Sequence
  Made in a lab
aagcttgccgccatggattttcaagtgcagattttcagcttcctgctaatcagtgcttcagtcataatgtcgcgaggattgcccgcccaggtggcatttacaccctacgccccggagcccgggagcacatgccggctcagagaatactatgaccagacagctcagatgtgctgcagcaaatgctcgccgggccaacatgcaaaagtcttctgtaccaagacctcggacaccgtgtgtgactcctgtgaggacagcacatacacccagctctggaactgggttcccgagtgcttgagctgtggctcccgctgtagctctgaccaggtggaaactcaagcctgcactcgggaacagaaccgcatctgcacctgcaggcccggctggtactgcgcgctgagcaagcaggaggggtgccggctgtgcgcgccgctgcgcaagtgccgcccgggcttcggcgtggccagaccaggaactgaaacatcagacgtggtgtgcaagccctgtgccccggggacgttctccaacacgacttcatccacggatatttgcaggccccaccagatctgtaacgtggtggccatccctgggaatgcaagcatggatgcagtctgcacgtccacgtcccccacccggagtatggccccaggggcagtacacttaccccagccagtgtccacacgatcccaacacacgcagccaactccagaacccagcactgctccaagcacctccttcctgctcccaatgggccccagccccccagctgaagggagcactggcgacaccggtgagcccaaatcttctgacaaaactcacacatgcccaccgtgcccagcacctgaagccgcgggtgcaccgtcagtcttcctcttccccccaaaacccaaggacaccctcatgatctcccggacccctgaggtcacatgcgtggtggtggacgtgagccacgaagaccctgaggtcaagttcaactggtacgtggacggcgtggaggtgcataatgccaagacaaagccgcgggaggagcagtacaacagcacgtaccgtgtggtcagcgtcctcaccgtcctgcaccaggactggctgaatggcaaggcgtacgcgtgcgcggtctccaacaaagccctcccagcccccatcgagaaaaccatctccaaagccaaagggcagccccgagaaccacaggtgtacaccctgcccccatcccgggatgagctgaccaagaaccaggtcagcctgacctgcctggtcaaaggcttctatccaagcgacatcgccgtggagtgggagagcaatgggcagccggagaacaactacaagaccacgcctcccgtgctggactccgacggctccttcttcctctacagcaagctcaccgtggacaagagcaggtggcagcaggggaacgtcttctcatgctccgtgatgcatgaggctctgcacaaccactacacgcagaagagcctctccctgtctccgggtcagaggcacaacaattcttccctgaatacaagaactcagaaagcacgtcattctccgaattctgaagttcaattgttagagtctggtggcggtcttgttcagcctggtggttctttacgtctttcttgcgctgcttccggattcactttctctaagtacgatatgtggtgggttcgccaagctcctggtaaaggtttggagtgggtttcttctatctggccttctggtggctggacttcttatgctgactccgttaaaggtcgcttcactatctctagagacaactctaagaatactctctacttgcagatgaacagcttaagggctgaggacacggccgtgtattactgtgcgaaatcccgtggcagcccctggtacggagattttgaccactggggccagggaaccctggtcaccgtctcaagcggtggcggcggttcggggggtggcggaagtggaggtggagggagtcagagcgaattgactcagccaccctcagtgtcagtggccccaggagagacggccacggtcacctgtgggggaatcaacattggaagtaaaagtgtccactggtatcagcagaagccagaccaggcccctgtggtggtcatgtattttgatagcgaccggccctcagggatccctgagcgattctctggctccaactctggagacacggccaccctgaccatcagcagggtcgaagccggggatgaggccgactattactgtcaggtgtgggatagtcgttctgatcaatatgtcttcggatttgggaccaaggtcaccgtcctatgagcggccgc

SEQ ID NO: 728 - DNA, 2279 bp, Artificial Sequence
  Made in a lab
aagcttgccgccatggattttcaagtgcagattttcagcttcctgctaatcagtgcttcagtcataatgtcgcgaggattgcccgcccaggtggcatttacaccctacgccccggagcccgggagcacatgccggctcagagaatactatgaccagacagctcagatgtgctgcagcaaatgctcgccgggccaacatgcaaaagtcttctgtaccaagacctcggacaccgtgtgtgactcctgtgaggacagcacatacacccagctctggaactgggttcccgagtgcttgagctgtggctcccgctgtagctctgaccaggtggaaactcaagcctgcactcgggaacagaaccgcatctgcacctgcaggcccggctggtactgcgcgctgagcaagcaggaggggtgccggctgtgcgcgccgctgcgcaagtgccgcccgggcttcggcgtggccagaccaggaactgaaacatcagacgtggtgtgcaagccctgtgccccggggacgttctccaacacgacttcatccacggatatttgcaggccccaccagatctgtaacgtggtggccatccctgggaatgcaagcatggatgcagtctgcacgtccacgtcccccacccggagtatggccccaggggcagtacacttaccccagccagtgtccacacgatcccaacacacgcagccaactccagaacccagcactgctccaagcacctccttcctgctcccaatgggccccagccccccagctgaagggagcactggcgacaccggtgagcccaaatcttctgacaaaactcacacatgcccaccgtgcccagcacctgaagccgcgggtgcaccgtcagtcttcctcttccccccaaaacccaaggacaccctcatgatctcccggacccctgaggtcacatgcgtggtggtggacgtgagccacgaagaccctgaggtcaagttcaactggtacgtggacggcgtggaggtgcataatgccaagacaaagccgcgggaggagcagtacaacagcacgtaccgtgtggtcagcgtcctcaccgtcctgcaccaggactggctgaatggcaaggcgtacgcgtgcgcggtctccaacaaagccctcccagcccccatcgagaaaaccatctccaaagccaaagggcagccccgagaaccacaggtgtacaccctgcccccatcccgggatgagctgaccaagaaccaggtcagcctgacctgcctggtcaaaggcttctatccaagcgacatcgccgtggagtgggagagcaatgggcagccggagaacaactacaagaccacgcctcccgtgctggactccgacggctccttcttcctctacagcaagctcaccgtggacaagagcaggtggcagcaggggaacgtcttctcatgctccgtgatgcatgaggctctgcacaaccactacacgcagaagagcctctccctgtctccgggtcagaggcacaacaattcttccctgaatacaagaactcagaaagcacgtcattctccgaattctgaagttcaattgttagagtctggtggcggtcttgttcagcctggtggttctttacgtctttcttgcgctgcttccggattcactttctctatgtacactatgcattgggttcgccaagctcctggtaaaggtttggagtgggtttcttggatctctccttctggtggctggactaagtatgctgactccgttaaaggtcgcttcactatctctagagacaactctaagaatactctctacttgcagatgaacagcttaagggctgaggacacggccgtgtattactgtgcggttagtccctggggtggaccctttgactactggggccagggaaccctggtcaccgtctcaagcggtggcggcggttcggggggtggcggaagtggaggtggagggagtcaagacatccagatgacccagtctccttccaccctgtctgcatctgtaggagacagagtcaccatcacttgccgggccagtcagagtattagcagctggttggcctggtatcagcagaaacctgggaaagcccctaagctcctgatctataaggcgtctactttagaaagtggggtcccatcacggttcagcgccggtggatctgggacagaattcactctcaccatcagcagcctgcagcctgatgattttggaacttattactgccaacagtataatagttattcgctcactttcggcggagggaccaaggtggagatcatatgagcggccgc

SEQ ID NO: 729 - DNA, 2409 bp, Artificial Sequence
  Made in a lab
tggacaactgcttactggcttatcgaattaatacgactcactatagggagacccaagcttgccgccatggattttcaagtgcagattttcagcttcctgctaatcagtgcttcagtcataatgtcgcgaggattgcccgcccaggtggcatttacaccctacgccccggagcccgggagcacatgccggctcagagaatactatgaccagacagctcagatgtgctgcagcaaatgctcgccgggccaacatgcaaaagtcttctgtaccaagacctcggacaccgtgtgtgactcctgtgaggacagcacatacacccagctctggaactgggttcccgagtgcttgagctgtggctcccgctgtagctctgaccaggtggaaactcaagcctgcactcgggaacagaaccgcatctgcacctgcaggcccggctggtactgcgcgctgagcaagcaggaggggtgccggctgtgcgcgccgctgcgcaagtgccgcccgggcttcggcgtggccagaccaggaactgaaacatcagacgtggtgtgcaagccctgtgccccggggacgttctccaacacgacttcatccacggatatttgcaggccccaccagatctgtaacgtggtggccatccctgggaatgcaagcatggatgcagtctgcacgtccacgtcccccacccggagtatggccccaggggcagtacacttaccccagccagtgtccacacgatcccaacacacgcagccaactccagaacccagcactgctccaagcacctccttcctgctcccaatgggccccagccccccagctgaagggagcactggcgacaccggtgagcccaaatcttctgacaaaactcacacatgcccaccgtgcccagcacctgaagccgcgggtgcaccgtcagtcttcctcttccccccaaaacccaaggacaccctcatgatctcccggacccctgaggtcacatgcgtggtggtggacgtgagccacgaagaccctgaggtcaagttcaactggtacgtggacggcgtggaggtgcataatgccaagacaaagccgcgggaggagcagtacaacagcacgtaccgtgtggtcagcgtcctcaccgtcctgcaccaggactggctgaatggcaaggcgtacgcgtgcgcggtctccaacaaagccctcccagcccccatcgagaaaaccatctccaaagccaaagggcagccccgagaaccacaggtgtacaccctgcccccatcccgggatgagctgaccaagaaccaggtcagcctgacctgcctggtcaaaggcttctatccaagcgacatcgccgtggagtgggagagcaatgggcagccggagaacaactacaagaccacgcctcccgtgctggactccgacggctccttcttcctctacagcaagctcaccgtggacaagagcaggtggcagcaggggaacgtcttctcatgctccgtgatgcatgaggctctgcacaaccactacacgcagaagagcctctccctgtctccgggtcagaggcacaacaattcttccctgaatacaagaactcagaaagcacgtcattctccgaattctgaagttcaattgttagagtctggtggcggtcttgttcagcctggtggttctttacgtctttcttgcgctgcttccggattcactttctctcagtactttatgatgtgggttcgccaagctcctggtaaaggtttggagtgggtttcttctatctctccttctggtggctatactcagtatgctgactccgttaaaggtcgcttcactatctctagagacaactctaagaatactctctacttgcagatgaacagcttaagggctgaggacacggccgtgtattactgtgcgaaaaccggtgactacacacgctactactcctacggtatggacgtctggggccagggaaccctggtcaccgtctcaagcggtggcggcggttcggggggtggcggaagtggaggtggagggagtcaagacatccagatgacccagtctccatcctccctgtctgcatctgtaggagacagagtcaccatcacttgccgggcaagtcagagcattagcagctatttaaattggtatcagcagaaaccagggaaagcccctaagctcctgatctatgctgcatccagtttgcaaagtggggtcccatcaaggttcagtggcagtggatctgggacagatttcactctcatcatcagcagtctgcaacctgaagattttgcaacttactactgtcaacagagttacagtaccccgctcactttcggcggagggaccaaggtggagatcaaatgagcggccgcctcgagtctagagggccctattctatagtgtcacctaaatgctagagctcgctgaccggcc

SEQ ID NO: 730 - DNA, 2297 bp, Artificial Sequence
  Made in a lab
aagcttgccgccatggattttcaagtgcagattttcagcttcctgctaatcagtgcttcagtcataatgtcgcgaggattgcccgcccaggtggcatttacaccctacgccccggagcccgggagcacatgccggctcagagaatactatgaccagacagctcagatgtgctgcagcaaatgctcgccgggccaacatgcaaaagtcttctgtaccaagacctcggacaccgtgtgtgactcctgtgaggacagcacatacacccagctctggaactgggttcccgagtgcttgagctgtggctcccgctgtagctctgaccaggtggaaactcaagcctgcactcgggaacagaaccgcatctgcacctgcaggcccggctggtactgcgcgctgagcaagcaggaggggtgccggctgtgcgcgccgctgcgcaagtgccgcccgggcttcggcgtggccagaccaggaactgaaacatcagacgtggtgtgcaagccctgtgccccggggacgttctccaacacgacttcatccacggatatttgcaggccccaccagatctgtaacgtggtggccatccctgggaatgcaagcatggatgcagtctgcacgtccacgtcccccacccggagtatggccccaggggcagtacacttaccccagccagtgtccacacgatcccaacacacgcagccaactccagaacccagcactgctccaagcacctccttcctgctcccaatgggccccagccccccagctgaagggagcactggcgacaccggtgagcccaaatcttctgacaaaactcacacatgcccaccgtgcccagcacctgaagccgcgggtgcaccgtcagtcttcctcttccccccaaaacccaaggacaccctcatgatctcccggacccctgaggtcacatgcgtggtggtggacgtgagccacgaagaccctgaggtcaagttcaactggtacgtggacggcgtggaggtgcataatgccaagacaaagccgcgggaggagcagtacaacagcacgtaccgtgtggtcagcgtcctcaccgtcctgcaccaggactggctgaatggcaaggcgtacgcgtgcgcggtctccaacaaagccctcccagcccccatcgagaaaaccatctccaaagccaaagggcagccccgagaaccacaggtgtacaccctgcccccatcccgggatgagctgaccaagaaccaggtcagcctgacctgcctggtcaaaggcttctatccaagcgacatcgccgtggagtgggagagcaatgggcagccggagaacaactacaagaccacgcctcccgtgctggactccgacggctccttcttcctctacagcaagctcaccgtggacaagagcaggtggcagcaggggaacgtcttctcatgctccgtgatgcatgaggctctgcacaaccactacacgcagaagagcctctccctgtctccgggtcagaggcacaacaattcttccctgaatacaagaactcagaaagcacgtcattctccgaattctgaagttcaattgttagagtctggtggcggtcttgttcagcctggtggttctttacgtctttcttgcgctgcttccggattcactttctctggttactctatggcttgggttcgccaagctcctggtaaaggtttggagtgggtttctggtatctactcttctggtggctggacttggtatgctgactccgttaaaggtcgcttcactatctctagagacaactctaagaatactctctacttgcagatgaacagcttaagggctgaggacacagccgtgtattactgtacaagagaccaatctttctcctatgatagtagtcttgatgcttttgatatctggggccaagggacaatggtcaccgtctcaagcggtggcggcggttcggggggtggcggaagtggaggtggagggagtcaagacatccagatgacccagtctccatcctccctgtctgcatctgtaggagacagagtcaccatcacttgccgggcaagtcagagtattaacaactatttaaattggtatcagcagaaaccagggaaagcccctaagctcctgatctatactgcatccactttgcacagtggggtcccatcaaggttcagtggcagtggatctgggacagatttcactctcaccatcagcaatctgcaacctgaagattttgcaacttactactgtcaacagagttacgctaccctccggacgttcggccaagggaccaaggtggagatcaaatgagcggccgc

SEQ ID NO: 731 - DNA, 2303 bp, Artificial Sequence
  Made in a lab
aagcttgccgccatggattttcaagtgcagattttcagcttcctgctaatcagtgcttcagtcataatgtcgcgaggattgcccgcccaggtggcatttacaccctacgccccggagcccgggagcacatgccggctcagagaatactatgaccagacagctcagatgtgctgcagcaaatgctcgccgggccaacatgcaaaagtcttctgtaccaagacctcggacaccgtgtgtgactcctgtgaggacagcacatacacccagctctggaactgggttcccgagtgcttgagctgtggctcccgctgtagctctgaccaggtggaaactcaagcctgcactcgggaacagaaccgcatctgcacctgcaggcccggctggtactgcgcgctgagcaagcaggaggggtgccggctgtgcgcgccgctgcgcaagtgccgcccgggcttcggcgtggccagaccaggaactgaaacatcagacgtggtgtgcaagccctgtgccccggggacgttctccaacacgacttcatccacggatatttgcaggccccaccagatctgtaacgtggtggccatccctgggaatgcaagcatggatgcagtctgcacgtccacgtcccccacccggagtatggccccaggggcagtacacttaccccagccagtgtccacacgatcccaacacacgcagccaactccagaacccagcactgctccaagcacctccttcctgctcccaatgggccccagccccccagctgaagggagcactggcgacaccggtgagcccaaatcttctgacaaaactcacacatgcccaccgtgcccagcacctgaagccgcgggtgcaccgtcagtcttcctcttccccccaaaacccaaggacaccctcatgatctcccggacccctgaggtcacatgcgtggtggtggacgtgagccacgaagaccctgaggtcaagttcaactggtacgtggacggcgtggaggtgcataatgccaagacaaagccgcgggaggagcagtacaacagcacgtaccgtgtggtcagcgtcctcaccgtcctgcaccaggactggctgaatggcaaggcgtacgcgtgcgcggtctccaacaaagccctcccagcccccatcgagaaaaccatctccaaagccaaagggcagccccgagaaccacaggtgtacaccctgcccccatcccgggatgagctgaccaagaaccaggtcagcctgacctgcctggtcaaaggcttctatccaagcgacatcgccgtggagtgggagagcaatgggcagccggagaacaactacaagaccacgcctcccgtgctggactccgacggctccttcttcctctacagcaagctcaccgtggacaagagcaggtggcagcaggggaacgtcttctcatgctccgtgatgcatgaggctctgcacaaccactacacgcagaagagcctctccctgtctccgggtcagaggcacaacaattcttccctgaatacaagaactcagaaagcacgtcattctccgaattctgaagttcaattgttagagtctggtggcggtcttgttcagcctggtggttctttacgtctttcttgcgctgcttccggattcactttctctctttacggtatgcattgggttcgccaagctcctggtaaaggtttggagtgggtttcttctatcgttccttctggtggccttactcgttatgctgactccgttaaaggtcgcttcactatctctagagacaactctaagaatactctctacttgcagatgaacagcttaagggctgaggacacagccacatattactgtgcgagactcgcgtattacgatttttggagtggtcgtgatgcttttgatatctggggccaagggacaatggtcaccgtctcaagcggtggcggcggttcggggggtggcggaagtggaggtggagggagtcagagcgtcttgactcagcctgcctccgtgtctgggtctcctggacagtcgatcaccatctcctgcagtggaagcagcagtgacgttggtcattatgactatgtctcctggtaccaacagcacccaggcaaggcccccaaactcatgatttatgatgtcagtaatcggccctcaggggtttctaatcgcttctctggctccaagtctggcaacacggcctccctgaccatctctgggctccaggctgacgacgaggctgagtattactgcagctcatatacaagcagcggcactcgagtcttcggaactgggaccaaggtcaccgtcctatgagcggccgc

SEQ ID NO: 732 - DNA, 2326 bp, Artificial Sequence
  Made in a lab
aagcttgccgccatggattttcaagtgcagattttcagcttcctgctaatcagtgcttcagtcataatgtcgcgaggattgcccgcccaggtggcatttacaccctacgccccggagcccgggagcacatgccggctcagagaatactatgaccagacagctcagatgtgctgcagcaaatgctcgccgggccaacatgcaaaagtcttctgtaccaagacctcggacaccgtgtgtgactcctgtgaggacagcacatacacccagctctggaactgggttcccgagtgcttgagctgtggctcccgctgtagctctgaccaggtggaaactcaagcctgcactcgggaacagaaccgcatctgcacctgcaggcccggctggtactgcgcgctgagcaagcaggaggggtgccggctgtgcgcgccgctgcgcaagtgccgcccgggcttcggcgtggccagaccaggaactgaaacatcagacgtggtgtgcaagccctgtgccccggggacgttctccaacacgacttcatccacggatatttgcaggccccaccagatctgtaacgtggtggccatccctgggaatgcaagcatggatgcagtctgcacgtccacgtcccccacccggagtatggccccaggggcagtacacttaccccagccagtgtccacacgatcccaacacacgcagccaactccagaacccagcactgctccaagcacctccttcctgctcccaatgggccccagccccccagctgaagggagcactggcgacaccggtgagcccaaatcttctgacaaaactcacacatgcccaccgtgcccagcacctgaagccgcgggtgcaccgtcagtcttcctcttccccccaaaacccaaggacaccctcatgatctcccggacccctgaggtcacatgcgtggtggtggacgtgagccacgaagaccctgaggtcaagttcaactggtacgtggacggcgtggaggtgcataatgccaagacaaagccgcgggaggagcagtacaacagcacgtaccgtgtggtcagcgtcctcaccgtcctgcaccaggactggctgaatggcaaggcgtacgcgtgcgcggtctccaacaaagccctcccagcccccatcgagaaaaccatctccaaagccaaagggcagccccgagaaccacaggtgtacaccctgcccccatcccgggatgagctgaccaagaaccaggtcagcctgacctgcctggtcaaaggcttctatccaagcgacatcgccgtggagtgggagagcaatgggcagccggagaacaactacaagaccacgcctcccgtgctggactccgacggctccttcttcctctacagcaagctcaccgtggacaagagcaggtggcagcaggggaacgtcttctcatgctccgtgatgcatgaggctctgcacaaccactacacgcagaagagcctctccctgtctccgggtcagaggcacaacaattcttccctgaatacaagaactcagaaagcacgtcattctccgaattctgaagttcaattgttagagtctggtggcggtcttgttcagcctggtggttctttacgtctttcttgcgctgcttccggattcactttctctcattacggtatggattgggttcgccaagctcctggtaaaggtttggagtgggtttcttctatctattcttctggtggctatactctttatgctgactccgttaaaggtcgcttcactatctctagagacaactctaagaatactctctacttgcagatgaacagcttaagggctgaggacacagccacatattactgtgccactagaacgtgggcggatgcttttgatgtctggggccaagggaccacggtcaccgtctcaagcggtggcggcggttcggggggtggcggaagtggaggtggagggagtcaagacatccagatgacccagtctccctccaccttgtctgcatctgtgggagacagagtcactttcacttgccgggccagtcagagtgtcaacaactgggtggcctggtatcagcagaaaccagggaaagcccctaagctcctgatctatgctgcatccagtttgcaaagtggggtcccatcaaggttcagtggcagtggatctgggacagatttcactctcaccatcagcagtctgcaacctgaagattttgcaacttactactgtcaacagagttacagtatgccgctcactttcggcggagggaccaaggtggagatcaaatgagcggccgcctcgagtctagagggccctattctatagtgtcacctaaatgctagag

SEQ ID NO: 733 - DNA, 2280 bp, Artificial Sequence
  Made in a lab
aagcttgccgccatggattttcaagtgcagattttcagcttcctgctaatcagtgcttcagtcataatgtcgcgaggagaagttcaattgttagagtctggtggcggtcttgttcagcctggtggttctttacgtctttcttgcgctgcttccggattcactttctctcattacatgatggcttgggttcgccaagctcctggtaaaggtttggagtgggtttcttatatctatccttctggtggctggacttcttatgctgactccgttaaaggtcgcttcactatctctagagacaactctaagaatactctctacttgcagatgaacagcttaagggctgaggacacggccgtgtattactgtgcgagattcgactatactataggttttgacttctggggccagggaaccctggtcaccgtctcaagcggtggcggcggttcggggggtggcggaagtggaggtggagggagtcaagacatccagatgacccagtctccatcctccctgtctgcatctgtaggagacagagtcaccatcacttgccgggcaagtcagagcattagcagctatttaaattggtatcagcagaaaccagggaaagcccctaagctcctgatctatgctgcatccagtttgcaaagtggggtcccatcaaggttcagtggcagtggatctgggacagatttcactctcaccatcagcagtctgcaacctgaagattttgcaacttactactgtcaacagagttacagtacccctcggacgttcggccaagggaccaaggtggaaatcaaaaccggtgagcccaaatcttctgacaaaactcacacatgcccaccgtgcccagcacctgaagccgcgggtgcaccgtcagtcttcctcttccccccaaaacccaaggacaccctcatgatctcccggacccctgaggtcacatgcgtggtggtggacgtgagccacgaagaccctgaggtcaagttcaactggtacgtggacggcgtggaggtgcataatgccaagacaaagccgcgggaggagcagtacaacagcacgtaccgtgtggtcagcgtcctcaccgtcctgcaccaggactggctgaatggcaaggcgtacgcgtgcgcggtctccaacaaagccctcccagcccccatcgagaaaaccatctccaaagccaaagggcagccccgagaaccacaggtgtacaccctgcccccatcccgggatgagctgaccaagaaccaggtcagcctgacctgcctggtcaaaggcttctatccaagcgacatcgccgtggagtgggagagcaatgggcagccggagaacaactacaagaccacgcctcccgtgctggactccgacggctccttcttcctctacagcaagctcaccgtggacaagagcaggtggcagcaggggaacgtcttctcatgctccgtgatgcatgaggctctgcacaaccactacacgcagaagagcctctccctgtctccgggtcagaggcacaacaattcttccctgaatacaagaactcagaaagcacgtcattctccgaattctttgcccgcccaggtggcatttacaccctacgccccggagcccgggagcacatgccggctcagagaatactatgaccagacagctcagatgtgctgcagcaaatgctcgccgggccaacatgcaaaagtcttctgtaccaagacctcggacaccgtgtgtgactcctgtgaggacagcacatacacccagctctggaactgggttcccgagtgcttgagctgtggctcccgctgtagctctgaccaggtggaaactcaagcctgcactcgggaacagaaccgcatctgcacctgcaggcccggctggtactgcgcgctgagcaagcaggaggggtgccggctgtgcgcgccgctgcgcaagtgccgcccgggcttcggcgtggccagaccaggaactgaaacatcagacgtggtgtgcaagccctgtgccccggggacgttctccaacacgacttcatccacggatatttgcaggccccaccagatctgtaacgtggtggccatccctgggaatgcaagcatggatgcagtctgcacgtccacgtcccccacccggagtatggccccaggggcagtacacttaccccagccagtgtccacacgatcccaacacacgcagccaactccagaacccagcactgctccaagcacctccttcctgctcccaatgggccccagccccccagctgaagggagcactggcgactgagcggccgcc

SEQ ID NO: 734 - DNA, 2300 bp, Artificial Sequence
  Made in a lab
aagcttgccgccatggattttcaagtgcagattttcagcttcctgctaatcagtgcttcagtcataatgtcgcgaggagaagttcaattgttagagtctggtggcggtcttgttcagcctggtggttctttacgtctttcctgcgctgcttccggattcactttctcttggtaccttatgcattgggttcgccaagctcctggtaaaggtttggagtgggtttctggtatctggccttctggtggccatactctttatgctgactccgttaaaggtcgcttcactatctctagagacaactctaagaatactctctacttgcagatgaacagcttaagggctgaggacacggccgtgtattactgtgcgagagagccgttactatggttcggggagttatcgtacaactggttcgacccctggggccagggcaccctggtcaccgtctcaagcggtggcggcggttcggggggtggcggaagtggaggtggagggagtcaagacatccagatgacccagtctccatcttccgtgtctgcatctgtaggagacagagtcaccatcacttgtcgggcgagtcagggtattagcagctggttagcctggtatcagcagaaaccagggaaagcccctaagctcctgatctatgctgcatccagtttgcaaagtggggtcccatcaaggttcagcggcagtggatctgggacagatttcactctcaccatcagcagcctgcagcctgaagattttgcaacttactattgtcaacaggctaacagtttccctctcactttcggcggagggaccaaggtggagatcaaaaccggtgagcccaaatcttctgacaaaactcacacatgcccaccgtgcccagcacctgaagccgcgggtgcaccgtcagtcttcctcttccccccaaaacccaaggacaccctcatgatctcccggacccctgaggtcacatgcgtggtggtggacgtgagccacgaagaccctgaggtcaagttcaactggtacgtggacggcgtggaggtgcataatgccaagacaaagccgcgggaggagcagtacaacagcacgtaccgtgtggtcagcgtcctcaccgtcctgcaccaggactggctgaatggcaaggcgtacgcgtgcgcggtctccaacaaagccctcccagcccccatcgagaaaaccatctccaaagccaaagggcagccccgagaaccacaggtgtacaccctgcccccatcccgggatgagctgaccaagaaccaggtcagcctgacctgcctggtcaaaggcttctatccaagcgacatcgccgtggagtgggagagcaatgggcagccggagaacaactacaagaccacgcctcccgtgctggactccgacggctccttcttcctctacagcaagctcaccgtggacaagagcaggtggcagcaggggaacgtcttctcatgctccgtgatgcatgaggctctgcacaaccactacacgcagaagagcctctccctgtctccgggtcagaggcacaacaattcttccctgaatacaagaactcagaaagcacgtcattctccgaattctttgcccgcccaggtggcatttacaccctacgccccggagcccgggagcacatgccggctcagagaatactatgaccagacagctcagatgtgctgcagcaaatgctcgccgggccaacatgcaaaagtcttctgtaccaagacctcggacaccgtgtgtgactcctgtgaggacagcacatacacccagctctggaactgggttcccgagtgcttgagctgtggctcccgctgtagctctgaccaggtggaaactcaagcctgcactcgggaacagaaccgcatctgcacctgcaggcccggctggtactgcgcgctgagcaagcaggaggggtgccggctgtgcgcgccgctgcgcaagtgccgcccgggcttcggcgtggccagaccaggaactgaaacatcagacgtggtgtgcaagccctgtgccccggggacgttctccaacacgacttcatccacggatatttgcaggccccaccagatctgtaacgtggtggccatccctgggaatgcaagcatggatgcagtctgcacgtccacgtcccccacccggagtatggccccaggggcagtacacttaccccagccagtgtccacacgatcccaacacacgcagccaactccagaacccagcactgctccaagcacctccttcctgctcccaatgggccccagccccccagctgaagggagcactggcgactgagcggccgc

SEQ ID NO: 735 - protein, 693 aa, Artificial Sequence [sequence omitted]

SEQ ID NO: 736 - protein, 668 aa, Artificial Sequence
  Made in a lab
MDFQVQIFSFLLISASVIMSRGEVQLLESGGGLVQPGGSLRLSCAASGFTFSWYLMHWVRQAPGKGLEWVSGIWPSGGHTLYADSVKGRFTISRDNSKNTLYLQMNSLRAEDTAVYYCAREPLLWFGELSYNWFDPWGQGTLVTVSSGGGGSGGGGSGGGGSQDIQMTQSPSSVSASVGDRVTITCRASQGISSWLAWYQQKPGKAPKLLIYAASSLQSGVPSRFSGSGSGTDFTLTISSLQPEDFATYYCQQANSFPLTFGGGTKVEIKTGEPKSSDKTHTCPPCPAPEAAGAPSVFLFPPKPKDTLMISRTPEVTCVVVDVSHEDPEVKFNWYVDGVEVHNAKTKPREEQYNSTYRVVSVLTVLHQDWLNGKAYACAVSNKALPAPIEKTISKAKGQPREPQVYTLPPSRDELTKNQVSLTCLVKGFYPSDIAVEWESNGQPENNYKTTPPVLDSDGSFFLYSKLTVDKSRWQQGNVFSCSVMHEALHNHYTQKSLSLSPGQRHNNSSLNTRTQKARHSPNSTIPPHVQKSVNNDMIVTDNNGAVKFPQLCKFCDVRFSTCDNQKSCMSNCSITSICEKPQEVCVAVWRKNDENITLETVCHDPKLPYHDFILEDAASPKCIMKEKKKPGETFFMCSCSSDECNDNIIFSEEYNTSNPDLLLVIFQ

SEQ ID NO: 737 - protein, 693 aa, Artificial Sequence
  Made in a lab
MDFQVQIFSFLLISASVIMSRGTIPPHVQKSDVEMEAQKDEIICPSCNRTAHPLRHINNDMIVTDNNGAVKFPQLCKFCDVRFSTCDNQKSCMSNCSITSICEKPQEVCVAVWRKNDENITLETVCHDPKLPYHDFILEDAASPKCIMKEKKKPGETFFMCSCSSDECNDNIIFSEEYNTSNPDLLLVIFQTGEPKSSDKTHTCPPCPAPEAAGAPSVFLFPPKPKDTLMISRTPEVTCVVVDVSHEDPEVKFNWYVDGVEVHNAKTKPREEQYNSTYRVVSVLTVLHQDWLNGKAYACAVSNKALPAPIEKTISKAKGQPREPQVYTLPPSRDELTKNQVSLTCLVKGFYPSDIAVEWESNGQPENNYKTTPPVLDSDGSFFLYSKLTVDKSRWQQGNVFSCSVMHEALHNHYTQKSLSLSPGQRHNNSSLNTRTQKARHSPNSEVQLLESGGGLVQPGGSLRLSCAASGFTFSWYLMHWVRQAPGKGLEWVSGIWPSGGHTLYADSVKGRFTISRDNSKNTLYLQMNSLRAEDTAVYYCAREPLLWFGELSYNWFDPWGQGTLVTVSSGGGGSGGGGSGGGGSQDIQMTQSPSSVSASVGDRVTITCRASQGISSWLAWYQQKPGKAPKLLIYAASSLQSGVPSRFSGSGSGTDFTLTISSLQPEDFATYYCQQANSFPLTFGGGTKVEIK

SEQ ID NO: 738 - protein, 668 aa, Artificial Sequence [sequence omitted]

SEQ ID NO: 739 - DNA, 2102 bp, Artificial Sequence
  Made in a lab
aagcttgccgccatggattttcaagtgcagattttcagcttcctgctaatcagtgcttcagtcataatgtcgcgaggagaagttcaattgttagagtctggtggcggtcttgttcagcctggtggttctttacgtctttcctgcgctgcttccggattcactttctcttggtaccttatgcattgggttcgccaagctcctggtaaaggtttggagtgggtttctggtatctggccttctggtggccatactctttatgctgactccgttaaaggtcgcttcactatctctagagacaactctaagaatactctctacttgcagatgaacagcttaagggctgaggacacggccgtgtattactgtgcgagagagccgttactatggttcggggagttatcgtacaactggttcgacccctggggccagggcaccctggtcaccgtctcaagcggtggcggcggttcggggggtggcggaagtggaggtggagggagtcaagacatccagatgacccagtctccatcttccgtgtctgcatctgtaggagacagagtcaccatcacttgtcgggcgagtcagggtattagcagctggttagcctggtatcagcagaaaccagggaaagcccctaagctcctgatctatgctgcatccagtttgcaaagtggggtcccatcaaggttcagcggcagtggatctgggacagatttcactctcaccatcagcagcctgcagcctgaagattttgcaacttactattgtcaacaggctaacagtttccctctcactttcggcggagggaccaaggtggagatcaaaaccggtgagcccaaatcttctgacaaaactcacacatgcccaccgtgcccagcacctgaagccgcgggtgcaccgtcagtcttcctcttccccccaaaacccaaggacaccctcatgatctcccggacccctgaggtcacatgcgtggtggtggacgtgagccacgaagaccctgaggtcaagttcaactggtacgtggacggcgtggaggtgcataatgccaagacaaagccgcgggaggagcagtacaacagcacgtaccgtgtggtcagcgtcctcaccgtcctgcaccaggactggctgaatggcaaggcgtacgcgtgcgcggtctccaacaaagccctcccagcccccatcgagaaaaccatctccaaagccaaagggcagccccgagaaccacaggtgtacaccctgcccccatcccgggatgagctgaccaagaaccaggtcagcctgacctgcctggtcaaaggcttctatccaagcgacatcgccgtggagtgggagagcaatgggcagccggagaacaactacaagaccacgcctcccgtgctggactccgacggctccttcttcctctacagcaagctcaccgtggacaagagcaggtggcagcaggggaacgtcttctcatgctccgtgatgcatgaggctctgcacaaccactacacgcagaagagcctctccctgtctccgggtcagaggcacaacaattcttccctgaatacaagaactcagaaagcacgtcattctccgaattctacgatcccaccgcacgttcagaagtcggatgtggaaatggaggcccagaaagatgaaatcatctgccccagctgtaataggactgcccatccactgagacatattaataacgacatgatagtcactgacaacaacggtgcagtcaagtttccacaactgtgtaaattttgtgatgtgagattttccacctgtgacaaccagaaatcctgcatgagcaactgcagcatcacctccatctgtgagaagccacaggaagtctgtgtggctgtatggagaaagaatgacgagaacataacactagagacagtttgccatgaccccaagctcccctaccatgactttattctggaagatgctgcttctccaaagtgcattatgaaggaaaaaaaaaagcctggtgagactttcttcatgtgttcctgtagctctgatgagtgcaatgacaacatcatcttctcagaagaatataacaccagcaatcctgacttgttgctagtcatatttcaatgagcggccgc

SEQ ID NO: 740 - DNA, 2027 bp, Artificial Sequence
  Made in a lab
aagcttgccgccatggattttcaagtgcagattttcagcttcctgctaatcagtgcttcagtcataatgtcgcgaggagaagttcaattgttagagtctggtggcggtcttgttcagcctggtggttctttacgtctttcctgcgctgcttccggattcactttctcttggtaccttatgcattgggttcgccaagctcctggtaaaggtttggagtgggtttctggtatctggccttctggtggccatactctttatgctgactccgttaaaggtcgcttcactatctctagagacaactctaagaatactctctacttgcagatgaacagcttaagggctgaggacacggccgtgtattactgtgcgagagagccgttactatggttcggggagttatcgtacaactggttcgacccctggggccagggcaccctggtcaccgtctcaagcggtggcggcggttcggggggtggcggaagtggaggtggagggagtcaagacatccagatgacccagtctccatcttccgtgtctgcatctgtaggagacagagtcaccatcacttgtcgggcgagtcagggtattagcagctggttagcctggtatcagcagaaaccagggaaagcccctaagctcctgatctatgctgcatccagtttgcaaagtggggtcccatcaaggttcagcggcagtggatctgggacagatttcactctcaccatcagcagcctgcagcctgaagattttgcaacttactattgtcaacaggctaacagtttccctctcactttcggcggagggaccaaggtggagatcaaaaccggtgagcccaaatcttctgacaaaactcacacatgcccaccgtgcccagcacctgaagccgcgggtgcaccgtcagtcttcctcttccccccaaaacccaaggacaccctcatgatctcccggacccctgaggtcacatgcgtggtggtggacgtgagccacgaagaccctgaggtcaagttcaactggtacgtggacggcgtggaggtgcataatgccaagacaaagccgcgggaggagcagtacaacagcacgtaccgtgtggtcagcgtcctcaccgtcctgcaccaggactggctgaatggcaaggcgtacgcgtgcgcggtctccaacaaagccctcccagcccccatcgagaaaaccatctccaaagccaaagggcagccccgagaaccacaggtgtacaccctgcccccatcccgggatgagctgaccaagaaccaggtcagcctgacctgcctggtcaaaggcttctatccaagcgacatcgccgtggagtgggagagcaatgggcagccggagaacaactacaagaccacgcctcccgtgctggactccgacggctccttcttcctctacagcaagctcaccgtggacaagagcaggtggcagcaggggaacgtcttctcatgctccgtgatgcatgaggctctgcacaaccactacacgcagaagagcctctccctgtctccgggtcagaggcacaacaattcttccctgaatacaagaactcagaaagcacgtcattctccgaattctacgatcccaccgcacgttcagaagtcggttaataacgacatgatagtcactgacaacaacggtgcagtcaagtttccacaactgtgtaaattttgtgatgtgagattttccacctgtgacaaccagaaatcctgcatgagcaactgcagcatcacctccatctgtgagaagccacaggaagtctgtgtggctgtatggagaaagaatgacgagaacataacactagagacagtttgccatgaccccaagctcccctaccatgactttattctggaagatgctgcttctccaaagtgcattatgaaggaaaaaaaaaagcctggtgagactttcttcatgtgttcctgtagctctgatgagtgcaatgacaacatcatcttctcagaagaatataacaccagcaatcctgacttgttgctagtcatatttcaatgagcggccgc

SEQ ID NO: 741 - DNA, 2102 bp, Artificial Sequence
  Made in a lab
aagcttgccgccatggattttcaagtgcagattttcagcttcctgctaatcagtgcttcagtcataatgtcgcgaggaacgatcccaccgcacgttcagaagtcggatgtggaaatggaggcccagaaagatgaaatcatctgccccagctgtaataggactgcccatccactgagacatattaataacgacatgatagtcactgacaacaacggtgcagtcaagtttccacaactgtgtaaattttgtgatgtgagattttccacctgtgacaaccagaaatcctgcatgagcaactgcagcatcacctccatctgtgagaagccacaggaagtctgtgtggctgtatggagaaagaatgacgagaacataacactagagacagtttgccatgaccccaagctcccctaccatgactttattctggaagatgctgcttctccaaagtgcattatgaaggaaaaaaaaaagcctggtgagactttcttcatgtgttcctgtagctctgatgagtgcaatgacaacatcatcttctcagaagaatataacaccagcaatcctgacttgttgctagtcatatttcaaaccggtgagcccaaatcttctgacaaaactcacacatgcccaccgtgcccagcacctgaagccgcgggtgcaccgtcagtcttcctcttccccccaaaacccaaggacaccctcatgatctcccggacccctgaggtcacatgcgtggtggtggacgtgagccacgaagaccctgaggtcaagttcaactggtacgtggacggcgtggaggtgcataatgccaagacaaagccgcgggaggagcagtacaacagcacgtaccgtgtggtcagcgtcctcaccgtcctgcaccaggactggctgaatggcaaggcgtacgcgtgcgcggtctccaacaaagccctcccagcccccatcgagaaaaccatctccaaagccaaagggcagccccgagaaccacaggtgtacaccctgcccccatcccgggatgagctgaccaagaaccaggtcagcctgacctgcctggtcaaaggcttctatccaagcgacatcgccgtggagtgggagagcaatgggcagccggagaacaactacaagaccacgcctcccgtgctggactccgacggctccttcttcctctacagcaagctcaccgtggacaagagcaggtggcagcaggggaacgtcttctcatgctccgtgatgcatgaggctctgcacaaccactacacgcagaagagcctctccctgtctccgggtcagaggcacaacaattcttccctgaatacaagaactcagaaagcacgtcattctccgaattctgaagttcaattgttagagtctggtggcggtcttgttcagcctggtggttctttacgtctttcttgcgctgcttccggattcactttctcttggtaccttatgcattgggttcgccaagctcctggtaaaggtttggagtgggtttctggtatctggccttctggtggccatactctttatgctgactccgttaaaggtcgcttcactatctctagagacaactctaagaatactctctacttgcagatgaacagcttaagggctgaggacacggccgtgtattactgtgcgagagagccgttactatggttcggggagttatcgtacaactggttcgacccctggggccagggcaccctggtcaccgtctcaagcggtggcggcggttcggggggtggcggaagtggaggtggagggagtcaagacatccagatgacccagtctccatcttccgtgtctgcatctgtaggagacagagtcaccatcacttgtcgggcgagtcagggtattagcagctggttagcctggtatcagcagaaaccagggaaagcccctaagctcctgatctatgctgcatccagtttgcaaagtggggtcccatcaaggttcagcggcagtggatctgggacagatttcactctcaccatcagcagcctgcagcctgaagattttgcaacttactattgtcaacaggctaacagtttccctctcactttcggcggagggaccaaggtggagatcaaatgagcggccgc

SEQ ID NO: 742 - DNA, 2027 bp, Artificial Sequence
  Made in a lab
aagcttgccgccatggattttcaagtgcagattttcagcttcctgctaatcagtgcttcagtcataatgtcgcgaggaacgatcccaccgcacgttcagaagtcggttaataacgacatgatagtcactgacaacaacggtgcagtcaagtttccacaactgtgtaaattttgtgatgtgagattttccacctgtgacaaccagaaatcctgcatgagcaactgcagcatcacctccatctgtgagaagccacaggaagtctgtgtggctgtatggagaaagaatgacgagaacataacactagagacagtttgccatgaccccaagctcccctaccatgactttattctggaagatgctgcttctccaaagtgcattatgaaggaaaaaaaaaagcctggtgagactttcttcatgtgttcctgtagctctgatgagtgcaatgacaacatcatcttctcagaagaatataacaccagcaatcctgacttgttgctagtcatatttcaaaccggtgagcccaaatcttctgacaaaactcacacatgcccaccgtgcccagcacctgaagccgcgggtgcaccgtcagtcttcctcttccccccaaaacccaaggacaccctcatgatctcccggacccctgaggtcacatgcgtggtggtggacgtgagccacgaagaccctgaggtcaagttcaactggtacgtggacggcgtggaggtgcataatgccaagacaaagccgcgggaggagcagtacaacagcacgtaccgtgtggtcagcgtcctcaccgtcctgcaccaggactggctgaatggcaaggcgtacgcgtgcgcggtctccaacaaagccctcccagcccccatcgagaaaaccatctccaaagccaaagggcagccccgagaaccacaggtgtacaccctgcccccatcccgggatgagctgaccaagaaccaggtcagcctgacctgcctggtcaaaggcttctatccaagcgacatcgccgtggagtgggagagcaatgggcagccggagaacaactacaagaccacgcctcccgtgctggactccgacggctccttcttcctctacagcaagctcaccgtggacaagagcaggtggcagcaggggaacgtcttctcatgctccgtgatgcatgaggctctgcacaaccactacacgcagaagagcctctccctgtctccgggtcagaggcacaacaattcttccctgaatacaagaactcagaaagcacgtcattctccgaattctgaagttcaattgttagagtctggtggcggtcttgttcagcctggtggttctttacgtctttcttgcgctgcttccggattcactttctcttggtaccttatgcattgggttcgccaagctcctggtaaaggtttggagtgggtttctggtatctggccttctggtggccatactctttatgctgactccgttaaaggtcgcttcactatctctagagacaactctaagaatactctctacttgcagatgaacagcttaagggctgaggacacggccgtgtattactgtgcgagagagccgttactatggttcggggagttatcgtacaactggttcgacccctggggccagggcaccctggtcaccgtctcaagcggtggcggcggttcggggggtggcggaagtggaggtggagggagtcaagacatccagatgacccagtctccatcttccgtgtctgcatctgtaggagacagagtcaccatcacttgtcgggcgagtcagggtattagcagctggttagcctggtatcagcagaaaccagggaaagcccctaagctcctgatctatgctgcatccagtttgcaaagtggggtcccatcaaggttcagcggcagtggatctgggacagatttcactctcaccatcagcagcctgcagcctgaagattttgcaacttactattgtcaacaggctaacagtttccctctcactttcggcggagggaccaaggtggagatcaaatgagcggccgc

SEQ ID NO: 743 - protein, 191 aa, Human
MGRGLLRGLWPLHIVLWTRIASTIPPHVQKSDVEMEAQKDEIICPSCNRTAHPLRHINNDMIVTDNNGAVKFPQLCKFCDVRFSTCDNQKSCMSNCSITSICEKPQEVCVAVWRKNDENITLETVCHDPKLPYHDFILEDAASPKCIMKEKKKPGETFFMCSCSSDECNDNIIFSEEYNTSNPDLLLVIFQ

SEQ ID NO: 744 - protein, 166 aa, Human
MGRGLLRGLWPLHIVLWTRIASTIPPHVQKSVNNDMIVTDNNGAVKFPQLCKFCDVRFSTCDNQKSCMSNCSITSICEKPQEVCVAVWRKNDENITLETVCHDPKLPYHDFILEDAASPKCIMKEKKKPGETFFMCSCSSDECNDNIIFSEEYNTSNPDLLLVIFQ

SEQ ID NO: 745 - protein, 233 aa, Human
MLPCLVVLLAALLSLRLGSDAHGTELPSPPSVWFEAEFFHHILHWTPIPNQSESTCYEVALLRYGIESWNSISNCSQTLSYDLTAVTLDLYHSNGYRARVRAVDGSRHSNWTVTNTRFSVDEVTLTVGSVNLEIHNGFILGKIQLPRPKMAPANDTYESIFSHFREYEIAIRKVPGNFTFTHKKVKHENFSLLTSGEVGEFCVQVKPSVASRSNKGMWSKEECISLTRQYFTV

SEQ ID NO: 746 - protein, 126 aa, Human
ETAKEPCMAKFGPLPSKWQMASSEPPCVNKVSDWKLEILQNGLYLIYGQVAPNANYNDVAPFEVRLYKNKDMIQTLTNKSKIQNVGGTYELHVGDTIDLIFNSEHQVLKNNTYWGIILLANPQFIS

SEQ ID NO: 747 - protein, 1356 aa, Human
MQSKVLLAVALWLCVETRAASVGLPSVSLDLPRLSIQKDILTIKANTTLQITCRGQRDLDWLWPNNQSGSEQRVEVTECSDGLFCKTLTIPKVIGNDTGAYKCFYRETDLASVIYVYVQDYRSPFIASVSDQHGVVYITENKNKTVVIPCLGSISNLNVSLCARYPEKRFVPDGNRISWDSKKGFTIPSYMISYAGMVFCEAKINDESYQSIMYIVVVVGYRIYDVVLSPSHGIELSVGEKLVLNCTARTELNVGIDFNWEYPSSKHQHKKLVNRDLKTQSGSEMKKFLSTLTIDGVTRSDQGLYTCAASSGLMTKKNSTFVRVHEKPFVAFGSGMESLVEATVGERVRIPAKYLGYPPPEIKWYKNGIPLESNHTIKAGHVLTIMEVSERDTGNYTVILTNPISKEKQSHVVSLVVYVPPQIGEKSLISPVDSYQYGTTQTLTCTVYAIPPPHHIHWYWQLEEECANEPSQAVSVTNPYPCEEWRSVEDFQGGNKIEVNKNQFALIEGKNKTVSTLVIQAANVSALYKCEAVNKVGRGERVISFHVTRGPEITLQPDMQPTEQESVSLWCTADRSTFENLTWYKLGPQPLPIHVGELPTPVCKNLDTLWKLNATMFSNSTNDILIMELKNASLQDQGDYVCLAQDRKTKKRHCVVRQLTVLERVAPTITGNLENQTTSIGESIEVSCTASGNPPPQIMWFKDNETLVEDSGIVLKDGNRNLTIRRVRKEDEGLYTCQACSVLGCAKVEAFFIIEGAQEKTNLEIIILVGTAVIAMFFWLLLVIILRTVKRANGGELKTGYLSIVMDPDELPLDEHCERLPYDASKWEFPRDRLKLGKPLGRGAFGQVIEADAFGIDKTATCRTVAVKMLKEGATHSEHRALMSELKILIHIGHHLNVVNLLGACTKPGGPLMVIVEFCKFGNLSTYLRSKRNEFVPYKTKGARFRQGKDYVGAIPVDLKRRLDSITSSQSSASSGFVEEKSLSDVEEEEAPEDLYKDFLTLEHLICYSFQVAKGMEFLASRKCIHRDLAARNILLSEKNVVKICDFGLARDIYKDPDYVRKGDARLPLKWMAPETIFDRVYTIQSDVWSFGVLLWEIFSLGASPYPGVKIDEEFCRRLKEGTRMRAPDYTTPEMYQTMLDCWHGEPSQRPTFSELVEHLGNLLQANAQQDGKDYIVLPISETLSMEEDSGLSLPTSPVSCMEEEEVCDPKFHYDNTAGISQYLQNSKRKSRPVSVKTFEDIPLEEPEVKVIPDDNQTDSGMVLASEELKTLEDRTKLSPSFGGMVPSKSRESVASEGSNQTSGYQSGYHSDDTDTTVYSSEEAELLKLIEIGVQTGSTAQILQPDSGTTLSSPPV

SEQ ID NO: 748 - protein, 257 aa, Human
MAPVAVWAALAVGLELWAAAHALPAQVAFTPYAPEPGSTCRLREYYDQTAQMCCSKCSPGQHAKVFCTKTSDTVCDSCEDSTYTQLWNWVPECLSCGSRCSSDQVETQACTREQNRICTCRPGWYCALSKQEGCRLCAPLRKCRPGFGVARPGTETSDVVCKPCAPGTFSNTTSSTDICRPHQICNVVAIPGNASMDAVCTSTSPTRSMAPGAVHLPQPVSTRSQHTQPTPEPSTAPSTSFLLPMGPSPPAEGSTGD

SEQ ID NO: 749 - protein, 211 aa, Human
MGLSTVPDLLLPLVLLELLVGIYPSGVIGLVPHLGDREKRDSVCPQGKYIHPQNNSICCTKCHKGTYLYNDCPGPGQDTDCRECESGSFTASENHLRHCLSCSKCRKEMGQVEISSCTVDRDTVCGCRKNQYRHYWSENLFQCFNCSLCLNGTVHLSCQEKQNTVCTCHAGFFLRENECVSCSNCKKSLECTKLCLPQIENVKGTEDSGTT

SEQ ID NO: 750 - protein, 950 aa, Human
MKAPAVLAPGILVLLFTLVQRSNGECKEALAKSEMNVNMKYQLPNFTAETPIQNVILHEHHIFLGATNYIYVLNEEDLQKVAEYKTGPVLEHPDCFPCQDCSSKANLSGGVWKDNINMALVVDTYYDDQLISCGSVNRGTCQRHVFPHNHTADIQSEVHCIFSPQIEEPSQCPDCVVSALGAKVLSSVKDRFINFFVGNTINSSYFPDHPLHSISVRRLKETKDGFMFLTDQSYIDVLPEFRDSYPIKYVHAFESNNFIYFLTVQRETLDAQTFHTRIIRFCSINSGLHSYMEMPLECILTEKRKKRSTKKEVFNILQAAYVSKPGAQLARQIGASLNDDILFGVFAQSKPDSAEPMDRSAMCAFPIKYVNDFFNKIVNKNNVRCLQHFYGPNHEHCFNRTLLRNSSGCEARRDEYRTEFTTALQRVDLFMGQFSEVLLTSISTFIKGDLTIANLGTSEGRFMQVVVSRSGPSTPHVNFLLDSHPVSPEVIVEHTLNQNGYTLVITGKKITKIPLNGLGCRHFQSCSQCLSAPPFVQCGWCHDKCVRSEECLSGTWTQQICLPAIYKVFPNSAPLEGGTRLTICGWDFGFRRNNKFDLKKTRVLLGNESCTLTLSESTMNTLKCTVGPAMNKHFNMSIIISNGHGTTQYSTFSYVDPVITSISPKYGPMAGGTLLTLTGNYLNSGNSRHISIGGKTCTLKSVSNSILECYTPAQTISTEFAVKLKIDLANRETSIFSYREDPIVYEIHPTKSFISTWWKEPLNIVSFLFCFASGGSTITGVGKNLNSVSVPRMVINVHEAGRNFTVACQHRSNSEIICCTTPSLQQLNLQLPLKTKAFFMLDGILSKYFDLIYVHNPVFKPFEKPVMISMGNENVLEIKGNDIDPEAVKGEVLKVGNKSCENIHLHSEAVLCTVPNDLLKLNSELNIEWKQAISSTVLGKVIVQPDQNFT

SEQ ID NO: 751 - protein, 500 aa, Human
MKAPAVLAPGILVLLFTLVQRSNGECKEALAKSEMNVNMKYQLPNFTAETPIQNVILHEHHIFLGATNYIYVLNEEDLQKVAEYKTGPVLEHPDCFPCQDCSSKANLSGGVWKDNINMALVVDTYYDDQLISCGSVNRGTCQRHVFPHNHTADIQSEVHCIFSPQIEEPSQCPDCVVSALGAKVLSSVKDRFINFFVGNTINSSYFPDHPLHSISVRRLKETKDGFMFLTDQSYIDVLPEFRDSYPIKYVHAFESNNFIYFLTVQRETLDAQTFHTRIIRFCSINSGLHSYMEMPLECILTEKRKKRSTKKEVFNILQAAYVSKPGAQLARQIGASLNDDILFGVFAQSKPDSAEPMDRSAMCAFPIKYVNDFFNKIVNKNNVRCLQHFYGPNHEHCFNRTLLRNSSGCEARRDEYRTEFTTALQRVDLFMGQFSEVLLTSISTFIKGDLTIANLGTSEGRFMQVVVSRSGPSTPHVNFLLDSHPVSPEVIVEHTLNQNG

SEQ ID NO: 752 - protein, 567 aa, Human
MKAPAVLAPGILVLLFTLVQRSNGECKEALAKSEMNVNMKYQLPNFTAETPIQNVILHEHHIFLGATNYIYVLNEEDLQKVAEYKTGPVLEHPDCFPCQDCSSKANLSGGVWKDNINMALVVDTYYDDQLISCGSVNRGTCQRHVFPHNHTADIQSEVHCIFSPQIEEPSQCPDCVVSALGAKVLSSVKDRFINFFVGNTINSSYFPDHPLHSISVRRLKETKDGFMFLTDQSYIDVLPEFRDSYPIKYVHAFESNNFIYFLTVQRETLDAQTFHTRIIRFCSINSGLHSYMEMPLECILTEKRKKRSTKKEVFNILQAAYVSKPGAQLARQIGASLNDDILFGVFAQSKPDSAEPMDRSAMCAFPIKYVNDFFNKIVNKNNVRCLQHFYGPNHEHCFNRTLLRNSSGCEARRDEYRTEFTTALQRVDLFMGQFSEVLLTSISTFIKGDLTIANLGTSEGRFMQVVVSRSGPSTPHVNFLLDSHPVSPEVIVEHTLNQNGYTLVITGKKITKIPLNGLGCRHFQSCSQCLSAPPFVQCGWCHDKCVRSEECLSGTWTQQICLPAIYK

SEQ ID NO: 753 - protein, 1367 aa, Human
MKSGSGGGSPTSLWGLLFLSAALSLWPTSGEICGPGIDIRNDYQQLKRLENCTVIEGYLHILLISKAEDYRSYRFPKLTVITEYLLLFRVAGLESLGDLFPNLTVIRGWKLFYNYALVIFEMTNLKDIGLYNLRNITRGAIRIEKNADLCYLSTVDWSLILDAVSNNYIVGNKPPKECGDLCPGTMEEKPMCEKTTINNEYNYRCWTTNRCQKMCPSTCGKRACTENNECCHPECLGSCSAPDNDTACVACRHYYYAGVCVPACPPNTYRFEGWRCVDRDFCANILSAESSDSEGFVIHDGECMQECPSGFIRNGSQSMYCIPCEGPCPKVCEEEKKTKTIDSVTSAQMLQGCTIFKGNLLINIRRGNNIASELENFMGLIEVVTGYVKIRHSHALVSLSFLKNLRLILGEEQLEGNYSFYVLDNQNLQQLWDWDHRNLTIKAGKMYFAFNPKLCVSEIYRMEEVTGTKGRQSKGDINTRNNGERASCESDVLHFTSTTTSKNRIIITWHRYRPPDYRDLISFTVYYKEAPFKNVTEYDGQDACGSNSWNMVDVDLPPNKDVEPGILLHGLKPWTQYAVYVKAVTLTMVENDHIRGAKSEILYIRTNASVPSIPLDVLSASNSSSQLIVKWNPPSLPNGNLSYYIVRWQRQPQDGYLYRHNYCSKDKIPIRKYADGTIDIEEVTENPKTEVCGGEKGPCCACPKTEAEKQAEKEEAEYRKVFENFLHNSIFVPRPERKRRDVMQVANTTMSSRSRNTTAADTYNITDPEELETEYPFFESRVDNKERTVISNLRPFTLYRIDIHSCNHEAEKLGCSASNFVFARTMPAEGADDIPGPVTWEPRPENSIFLKWPEPENPNGLILMYEIKYGSQVEDQRECVSRQEYRKYGGAKLNRLNPGNYTARIQATSLSGNGSWTDPVFFYVQAKTGYENFIHLIIALPVAVLLIVGGLVIMLYVFHRKRNNSRLGNGVLYASVNPEYFSAADVYVPDEWEVAREKITMSRELGQGSFGMVYEGVAKGVVKDEPETRVAIKTVNEAASMRERIEFLNEASVMKEFNCHHVVRLLGVVSQGQPTLVIMELMTRGDLKSYLRSLRPEMENNPVLAPPSLSKMIQMAGEIADGMAYLNANKFVHRDLAARNCMVAEDFTVKIGDFGMTRDIYETDYYRKGGKGLLPVRWMSPESLKDGVFTTYSDVWSFGVVLWEIATLAEQPYQGLSNEQVLRFVMEGGLLDKPDNCPDMLFELMRMCWQYNPKMRPSFLEIISSIKEEMEPGFREVSFYYSEENKLPEPEELDLEPENMESVPLDPSASSSSLPLPDRHSGHKAENGPGPGVLVLRASFDERQPYAHMNGGRKNERALPLPQSSTC

SEQ ID NO: 754 - protein, 259 aa, Human
MSEVPVARVWLVLLLLTVQVGVTAGAPWQCAPCSAEKLALCPPVSASCSEVTRSAGCGCCPMCALPLGAACGVATARCARGLSCRALPGEQQPLHALTRGQGACVQESDASAPHAAEAGSPESPESTEITEEELLDNFHLMAPSEEDHSILWDAISTYDGSKALHVTNIKKWKEPCRIELYRVVESLAKAQETSGEEISKFYLPNCNKNGFYHSRQCETSMDGEAGLCWCVYPWNGKRIPGSPEIRGDPNCQIYFNVQN

SEQ ID NO: 755 - protein, 328 aa, Human
MLPRVGCPALPLPPPPLLPLLPLLLLLLGASGGGGGARAEVLFRCPPCTPERLAACGPPPVAPPAAVAAVAGGARMPCAELVREPGCGCCSVCARLEGEACGVYTPRCGQGLRCYPHPGSELPLQALVMGEGTCEKRRDAEYGASPEQVADNGDDHSEGGLVENHVDSTMNMLGGGGSAGRKPLKSGMKELAVFREKVTEQHRQMGKGGKHHLGLEEPKKLRPPPARTPCQQELDQVLERISTMRLPDERGPLEHLYSLHIPNCDKHGLYNLKQCKMSLNGQRGECWCVNPNTGKLIQGAPTIRGDPECHLFYNEQQEARGVHTQRMQ

SEQ ID NO: 756 - protein, 297 aa, Human
MQRARPTLWAAALTLLVLLRGPPVARAGASSAGLGPVVRCEPCDARALAQCAPPPAVCAELVREPGCGCCLTCALSEGQPCGIYTERCGSGLRCQPSPDEARPLQALLDGRGLCVNASAVSRLRAYLLPAPPAPGEPPAPGNASESEEDRSAGSVESPSVSSTHRVSDPKFHPLHSKIIIIKKGHAKDSQRYKVDYESQSTDTQNFSSESKRETEYGPCRREMEDTLNHLKFLNVLSPRGVHIPNCDKKGFYKKKQCRPSKGRKRGFCWCVDKYGQPLPGYTTKGKEDVHCYSMQSK

SEQ ID NO: 757 - protein, 291 aa, Human
MQRARPTLWAAALTLLVLLRGPPVARAGASSAGLGPVVRCEPCDARALAQCAPPPAVCAELVREPGCGCCLTCALSEGQPCGIYTERCGSGLRCQPSPDEARPLQALLDGRGLCVNASAVSRLRAYLLPAPPAPGNASESEEDRSAGSVESPSVSSTHRVSDPKFHPLHSKIIIIKKGHAKDSQRYKVDYESQSTDTQNFSSESKRETEYGPCRREMEDTLNHLKFLNVLSPRGVHIPNCDKKGFYKKKQCRPSKGRKRGFCWCVDKYGQPLPGYTTKGKEDVHCYSMQSK

SEQ ID NO: 758 - protein, 258 aa, Human
MLPLCLVAALLLAAGPGPSLGDEAIHCPPCSEEKLARCRPPVGCEELVREPGCGCCATCALGLGMPCGVYTPRCGSGLRCYPPRGVEKPLHTLMHGQGVCMELAEIEAIQESLQPSDKDEGDHPNNSFSPCSAHDRRCLQKHFAKIRDRSTSGGKMKVNGAPREDARPVPQGSCQSELHRALERLAASQSRTHEDLYIIPIPNCDRNGNFHPKQCHPALDGQRGKCWCVDRKTGVKLPGGLEPKGELDCHQLADSFRE

SEQ ID NO: 759 - protein, 272 aa, Human
MVLLTAVLLLLAAYAGPAQSLGSFVHCEPCDEKALSMCPPSPLGCELVKEPGCGCCMTCALAEGQSCGVYTERCAQGLRCLPRQDEEKPLHALLHGRGVCLNEKSYREQVKIERDSREHEEPTTSEMAEETYSPKIFRPKHTRISELKAEAVKKDRRKKLTQSKFVGGAENTAHPRIISAPEMRQESEQGPCRRHMEASLQELKASPRMVPRAVYLPNCDRKGFYKRKQCKPSRGRKRGICWCVDKYGMKLPGMEYVDGDFQCHTFDSSNVE

SEQ ID NO: 760 - protein, 240 aa, Human
MTPHRLLPPLLLLLALLLAASPGGALARCPGCGQGVQAGCPGGCVEEEDGGSPAEGCAEAEGCLRREGQECGVYTPNCAPGLQCHPPKDDEAPLRALLLGRGRCLPARAPAVAEENPKESKPQAGTARPQDVNRRDQQRNPGTSTTPSQPNSAGVQDTEMGPCRRHLDSVLQQLQTEVYRGAQTLYVPNCDHRGFYRKRQCRSSQGQRRGPCWCVDRMGKSLPGSPDGNGSSSCPTGSSG

SEQ ID NO: 761 - protein, 79 aa, Human
MARGSLRRLLRLLVLGLWLALLRSVAGEQAPGTAPCSRGSSWSADLDKCMDCASCRARPHSDFCLGCAAAPPAPFRLLW

SEQ ID NO: 762 - protein, 11 aa, Artificial Sequence
  Made in lab
QGDSLRNYHPS

SEQ ID NO: 763 - protein, 7 aa, Artificial Sequence
  Made in lab
GKNNRPS

SEQ ID NO: 764 - protein, 11 aa, Artificial Sequence
  Made in lab
NSRDSSGNLVF

SEQ ID NO: 765 - protein, 11 aa, Artificial Sequence
  Made in lab
SGDKLGDKYAS

SEQ ID NO: 766 - protein, 7 aa, Artificial Sequence
  Made in lab
QDRKRPS

SEQ ID NO: 767 - protein, 9 aa, Artificial Sequence
  Made in lab
QAWDSNTVV

SEQ ID NO: 768 - protein, 13 aa, Artificial Sequence
  Made in lab
SGSSSNIGSDYVH

SEQ ID NO: 769 - protein, 7 aa, Artificial Sequence
  Made in lab
RNNKRPS

SEQ ID NO: 770 - protein, 11 aa, Artificial Sequence
  Made in lab
AAWDDSLNGWV

SEQ ID NO: 771 - protein, 11 aa, Artificial Sequence
  Made in lab
SGDKLGDKYAS

SEQ ID NO: 772 - protein, 7 aa, Artificial Sequence
  Made in lab
EDNKRPS

SEQ ID NO: 773 - protein, 9 aa, Artificial Sequence
  Made in lab
QTWASGTVL

SEQ ID NO: 774 - protein, 13 aa, Artificial Sequence
  Made in lab
SGSSSNIGSNTVN

SEQ ID NO: 775 - protein, 7 aa, Artificial Sequence
  Made in lab
ANNQRPS

SEQ ID NO: 776 - protein, 11 aa, Artificial Sequence
  Made in lab
AVWDDSLNAWV

SEQ ID NO: 777 - protein, 11 aa, Artificial Sequence
  Made in lab
SGDKLENKYTS

SEQ ID NO: 778 - protein, 7 aa, Artificial Sequence
  Made in lab
EDIERPS

SEQ ID NO: 779 - protein, 10 aa, Artificial Sequence
  Made in lab
QAWDSNIAVV

SEQ ID NO: 780 - protein, 13 aa, Artificial Sequence
  Made in lab
SGGNSNIGSHYVY

SEQ ID NO: 781 - protein, 7 aa, Artificial Sequence
  Made in lab
RDNQRPS

SEQ ID NO: 782 - protein, 11 aa, Artificial Sequence
  Made in lab
AAWDDSLGGPV

SEQ ID NO: 783 - protein, 13 aa, Artificial Sequence
  Made in lab
SGSSSNIGRNAVN

SEQ ID NO: 784 - protein, 7 aa, Artificial Sequence
  Made in lab
NNNQRPS

SEQ ID NO: 785 - protein, 11 aa, Artificial Sequence
  Made in lab
AAWDDSLNGWV

SEQ ID NO: 786 - protein, 11 aa, Artificial Sequence
  Made in lab
GGNNIGDKSVH

SEQ ID NO: 787 - protein, 7 aa, Artificial Sequence
  Made in lab
EDKNRPA

SEQ ID NO: 788 - protein, 11 aa, Artificial Sequence
  Made in lab
QVWDSSTDHHV

SEQ ID NO: 789 - protein, 11 aa, Artificial Sequence
  Made in lab
GGNNIGTTSVQ

SEQ ID NO: 790 - protein, 7 aa, Artificial Sequence
  Made in lab
YGSDRPS

SEQ ID NO: 791 - protein, 9 aa, Artificial Sequence
  Made in lab
QTWVKGAGI

SEQ ID NO: 792 - protein, 11 aa, Artificial Sequence
  Made in lab
RASQSIRNYLN

SEQ ID NO: 793 - protein, 7 aa, Artificial Sequence
  Made in lab
AASSLQS

SEQ ID NO: 794 - protein, 9 aa, Artificial Sequence
  Made in lab
QQSYVTPLT

SEQ ID NO: 795 - protein, 10 aa, Artificial Sequence
  Made in lab
RASQSVNSLN

SEQ ID NO: 796 - protein, 7 aa, Artificial Sequence
  Made in lab
GISSLRR

SEQ ID NO: 797 - protein, 9 aa, Artificial Sequence
  Made in lab
QQSHSVPLT

SEQ ID NO: 798 - protein, 11 aa, Artificial Sequence
  Made in lab
RASQGIRNDLG

SEQ ID NO: 799 - protein, 7 aa, Artificial Sequence
  Made in lab
AASSLQS

SEQ ID NO: 800 - protein, 9 aa, Artificial Sequence
  Made in lab
LQHNSYPPT

SEQ ID NO: 801 - protein, 11 aa, Artificial Sequence
  Made in lab
RASQSVSSDLA

SEQ ID NO: 802 - protein, 7 aa, Artificial Sequence
  Made in lab
DAFKRAT

SEQ ID NO: 803 - protein, 9 aa, Artificial Sequence
  Made in lab
QQRSNWPLT

SEQ ID NO: 804 - protein, 11 aa, Artificial Sequence
  Made in lab
RASQSVSSYLA

SEQ ID NO: 805 - protein, 7 aa, Artificial Sequence
  Made in lab
DASNRAT

SEQ ID NO: 806 - protein, 9 aa, Artificial Sequence
  Made in lab
QQRSNWPLT

SEQ ID NO: 807 - protein, 16 aa, Artificial Sequence
  Made in lab
RSSQSLLYSNGYNYLD

SEQ ID NO: 808 - protein, 7 aa, Artificial Sequence
  Made in lab
LGSNRAS

SEQ ID NO: 809 - protein, 9 aa, Artificial Sequence
  Made in lab
MQALQSPLT

SEQ ID NO: 810 - protein, 12 aa, Artificial Sequence
  Made in lab
RASQSVSSSYLA

SEQ ID NO: 811 - protein, 7 aa, Artificial Sequence
  Made in lab
GASSRAT

SEQ ID NO: 812 - protein, 5 aa, Artificial Sequence
  Made in lab
QQRSI

SEQ ID NO: 813 - protein, 11 aa, Artificial Sequence
  Made in lab
RTSQYIRTNLA

SEQ ID NO: 814 - protein, 7 aa, Artificial Sequence
  Made in lab
DGSNRAT

SEQ ID NO: 815 - protein, 9 aa, Artificial Sequence
  Made in lab
QQRSNWPLT

SEQ ID NO: 816 - protein, 11 aa, Artificial Sequence
  Made in lab
RTSQQIMTYLN

SEQ ID NO: 817 - protein, 7 aa, Artificial Sequence
  Made in lab
VASRLQG

SEQ ID NO: 818 - protein, 9 aa, Artificial Sequence
  Made in lab
QQSFWTPLT

SEQ ID NO: 819 - protein, 11 aa, Artificial Sequence
  Made in lab
QASQDIDNYLN

SEQ ID NO: 820 - protein, 7 aa, Artificial Sequence
  Made in lab
DAYNLKA

SEQ ID NO: 821 - protein, 9 aa, Artificial Sequence
  Made in lab
QVFDDLSVT

SEQ ID NO: 822 - protein, 11 aa, Artificial Sequence
  Made in lab
RASQGIKNDLG

SEQ ID NO: 823 - protein, 7 aa, Artificial Sequence
  Made in lab
AASSLQS

SEQ ID NO: 824 - protein, 9 aa, Artificial Sequence
  Made in lab
QQSNSFPLT

SEQ ID NO: 825 - protein, 11 aa, Artificial Sequence
  Made in lab
QASHDINNYLN

SEQ ID NO: 826 - protein, 7 aa, Artificial Sequence
  Made in lab
DASNLQS

SEQ ID NO: 827 - protein, 9 aa, Artificial Sequence
  Made in lab
QQYDTLPVT

SEQ ID NO: 828 - protein, 13 aa, Artificial Sequence
  Made in lab
AGSSSNIGSNSVY

SEQ ID NO: 829 - protein, 7 aa, Artificial Sequence
  Made in lab
SNNKRPS

SEQ ID NO: 830 - protein, 11 aa, Artificial Sequence
  Made in lab
AAWDDSLRSVV

SEQ ID NO: 831 - protein, 13 aa, Artificial Sequence
  Made in lab
SGSSSTIGSNFVN

SEQ ID NO: 832 - protein, 7 aa, Artificial Sequence
  Made in lab
TNNQRPS

SEQ ID NO: 833 - protein, 11 aa, Artificial Sequence
  Made in lab
ATWDDNLLGPV

SEQ ID NO: 834 - protein, 11 aa, Artificial Sequence
  Made in lab
RASEGISSRLA

SEQ ID NO: 835 - protein, 7 aa, Artificial Sequence
  Made in lab
ATSSLQS

SEQ ID NO: 836 - protein, 9 aa, Artificial Sequence
  Made in lab
LQANTLPLT

SEQ ID NO: 837 - protein, 11 aa, Artificial Sequence
  Made in lab
RASLGVSNYLA

SEQ ID NO: 838 - protein, 7 aa, Artificial Sequence
  Made in lab
AASILQT

SEQ ID NO: 839 - protein, 9 aa, Artificial Sequence
  Made in lab
QHYQGYPYT

SEQ ID NO: 840 - protein, 11 aa, Artificial Sequence
  Made in lab
RASQSIDTYLN

SEQ ID NO: 841 - protein, 7 aa, Artificial Sequence
  Made in lab
AASKLED

SEQ ID NO: 842 - protein, 10 aa, Artificial Sequence
  Made in lab
QQSYSSPGIT

SEQ ID NO: 843 - protein, 11 aa, Artificial Sequence
  Made in lab
QASQDISDYLN

SEQ ID NO: 844 - protein, 7 aa, Artificial Sequence
  Made in lab
DASNLET

SEQ ID NO: 845 - protein, 9 aa, Artificial Sequence
  Made in lab
QQNDNLPFT

SEQ ID NO: 846 - protein, 11 aa, Artificial Sequence
  Made in lab
RASQSISSYLN

SEQ ID NO: 847 - protein, 7 aa, Artificial Sequence
  Made in lab
AASSLQS

SEQ ID NO: 848 - protein, 9 aa, Artificial Sequence
  Made in lab
QQSYSTPYT

SEQ ID NO: 849 - protein, 11 aa, Artificial Sequence
  Made in lab
RAGQAIRNNLG

SEQ ID NO: 850 - protein, 7 aa, Artificial Sequence
  Made in lab
AASSLQS

SEQ ID NO: 851 - protein, 9 aa, Artificial Sequence
  Made in lab
LQHNSFPYT

SEQ ID NO: 852 - protein, 11 aa, Artificial Sequence
  Made in lab
QASQDIINYLN

SEQ ID NO: 853 - protein, 7 aa, Artificial Sequence
  Made in lab
DASNLET

SEQ ID NO: 854 - protein, 9 aa, Artificial Sequence
  Made in lab
QQYDNLPYT

SEQ ID NO: 855 - protein, 12 aa, Artificial Sequence
  Made in lab
RATQSVRHNYLA

SEQ ID NO: 856 - protein, 7 aa, Artificial Sequence
  Made in lab
GAFFRAT

SEQ ID NO: 857 - protein, 9 aa, Artificial Sequence
  Made in lab
QQYGSSPVT

SEQ ID NO: 858 - protein, 11 aa, Artificial Sequence
  Made in lab
RASQSISSYLN

SEQ ID NO: 859 - protein, 7 aa, Artificial Sequence
  Made in lab
AASSLQS

SEQ ID NO: 860 - protein, 9 aa, Artificial Sequence
  Made in lab
QQSYSTSYT

SEQ ID NO: 861 - protein, 12 aa, Artificial Sequence
  Made in lab
RASQSVSSRYLA

SEQ ID NO: 862 - protein, 7 aa, Artificial Sequence
  Made in lab
AASSRAT

SEQ ID NO: 863 - protein, 10 aa, Artificial Sequence
  Made in lab
QQYGSSPPYT

SEQ ID NO: 864 - protein, 11 aa, Artificial Sequence
  Made in lab
RASQSVSFSLA

SEQ ID NO: 865 - protein, 7 aa, Artificial Sequence
  Made in lab
DTSNRVA

SEQ ID NO: 866 - protein, 8 aa, Artificial Sequence
  Made in lab
QHRSNWPG

SEQ ID NO: 867 - protein, 11 aa, Artificial Sequence
  Made in lab
QASQDIINYLN

SEQ ID NO: 868 - protein, 7 aa, Artificial Sequence
  Made in lab
DASNLET

SEQ ID NO: 869 - protein, 9 aa, Artificial Sequence
  Made in lab
QQYDNLPYT

SEQ ID NO: 870 - protein, 11 aa, Artificial Sequence
  Made in lab
QASQHISKYLN

SEQ ID NO: 871 - protein, 7 aa, Artificial Sequence
  Made in lab
DASNLET

SEQ ID NO: 872 - protein, 9 aa, Artificial Sequence
  Made in lab
QQYDNLPLT

SEQ ID NO: 873 - protein, 11 aa, Artificial Sequence
  Made in lab
RASQSIGSYLN

SEQ ID NO: 874 - protein, 7 aa, Artificial Sequence
  Made in lab
AATSLHT

SEQ ID NO: 875 - protein, 9 aa, Artificial Sequence
  Made in lab
QQYDNYPLT

SEQ ID NO: 876 - protein, 11 aa, Artificial Sequence
  Made in lab
RASQGIRNDLG

SEQ ID NO: 877 - protein, 7 aa, Artificial Sequence
  Made in lab
AASSLQS

SEQ ID NO: 878 - protein, 9 aa, Artificial Sequence
  Made in lab
LQHNSYPRT

SEQ ID NO: 879 - protein, 11 aa, Artificial Sequence
  Made in lab
RASQSVSSNLA

SEQ ID NO: 880 - protein, 7 aa, Artificial Sequence
  Made in lab
GASTRAT

SEQ ID NO: 881 - protein, 9 aa, Artificial Sequence
  Made in lab
QQYNNWPRT

SEQ ID NO: 882 - protein, 11 aa, Artificial Sequence
  Made in lab
RASQRIINYVS

SEQ ID NO: 883 - protein, 7 aa, Artificial Sequence
  Made in lab
GASTLQT

SEQ ID NO: 884 - protein, 9 aa, Artificial Sequence
  Made in lab
RQSYSSPLT

SEQ ID NO: 885 - protein, 11 aa, Artificial Sequence
  Made in lab
RASQTITTSLN

SEQ ID NO: 886 - protein, 7 aa, Artificial Sequence
  Made in lab
AASRLQN

SEQ ID NO: 887 - protein, 9 aa, Artificial Sequence
  Made in lab
QQSYNIPYT

SEQ ID NO: 888 - protein, 11 aa, Artificial Sequence
  Made in lab
RASQSIGSYLN

SEQ ID NO: 889 - protein, 7 aa, Artificial Sequence
  Made in lab
DASNLQS

SEQ ID NO: 890 - protein, 9 aa, Artificial Sequence
  Made in lab
QQSYRLFPT

SEQ ID NO: 891 - protein, 11 aa, Artificial Sequence
  Made in lab
QASQGIYNYVN

SEQ ID NO: 892 - protein, 7 aa, Artificial Sequence
  Made in lab
DASNLET

SEQ ID NO: 893 - protein, 9 aa, Artificial Sequence
  Made in lab
QQYDDVPIT

SEQ ID NO: 894 - protein, 11 aa, Artificial Sequence
  Made in lab
RASQGISSWLA

SEQ ID NO: 895 - protein, 7 aa, Artificial Sequence
  Made in lab
AASSLQS

SEQ ID NO: 896 - protein, 9 aa, Artificial Sequence
  Made in lab
QQANSFPIT

SEQ ID NO: 897 - protein, 11 aa, Artificial Sequence
  Made in lab
RSSQSIAKYLT

SEQ ID NO: 898 - protein, 7 aa, Artificial Sequence
  Made in lab
AASELQS

SEQ ID NO: 899 - protein, 9 aa, Artificial Sequence
  Made in lab
QQTYSFPHT

SEQ ID NO: 900 - protein, 11 aa, Artificial Sequence
  Made in lab
AGNNIGSKSVH

SEQ ID NO: 901 - protein, 7 aa, Artificial Sequence
  Made in lab
DDSDRPP

SEQ ID NO: 902 - protein, 11 aa, Artificial Sequence
  Made in lab
QVWDSDSDHYV

SEQ ID NO: 903 - protein, 11 aa, Artificial Sequence
  Made in lab
SGDRLGDKYAS

SEQ ID NO: 904 - protein, 7 aa, Artificial Sequence
  Made in lab
DDSERPS

SEQ ID NO: 905 - protein, 8 aa, Artificial Sequence
  Made in lab
QVWDSSIV

SEQ ID NO: 906 - protein, 14 aa, Artificial Sequence
  Made in lab
TGSTSDVGGYTYVS

SEQ ID NO: 907 - protein, 7 aa, Artificial Sequence
  Made in lab
DVSKRPS

SEQ ID NO: 908 - protein, 10 aa, Artificial Sequence
  Made in lab
CSYAGSYSYV

SEQ ID NO: 909 - protein, 11 aa, Artificial Sequence
  Made in lab
SGDKLGDKYAC

SEQ ID NO: 910 - protein, 7 aa, Artificial Sequence
  Made in lab
QDSKRPS

SEQ ID NO: 911 - protein, 9 aa, Artificial Sequence
  Made in lab
QAWDSSTYV

SEQ ID NO: 912 - protein, 14 aa, Artificial Sequence
  Made in lab
TGTSSDVGGHNYVS

SEQ ID NO: 913 - protein, 7 aa, Artificial Sequence
  Made in lab
DVSKRPS

SEQ ID NO: 914 - protein, 10 aa, Artificial Sequence
  Made in lab
CSYAGRYTYV

SEQ ID NO: 915 - protein, 11 aa, Artificial Sequence
  Made in lab
SGDRLEDKYTS

SEQ ID NO: 916 - protein, 7 aa, Artificial Sequence
  Made in lab
QDNKRPS

SEQ ID NO: 917 - protein, 10 aa, Artificial Sequence
  Made in lab
QAWDSSSAYV

SEQ ID NO: 918 - protein, 11 aa, Artificial Sequence
  Made in lab
GGNNIGSKSVH

SEQ ID NO: 919 - protein, 8 aa, Artificial Sequence
  Made in lab
FFDYDRPS

SEQ ID NO: 920 - protein, 11 aa, Artificial Sequence
  Made in lab
QVWDSRTDRYV

SEQ ID NO: 921 - protein, 5 aa, Artificial Sequence
  Made in lab
IYDMH

SEQ ID NO: 922 - protein, 17 aa, Artificial Sequence
  Made in lab
WISPSGGRTLYADSVKG

SEQ ID NO: 923 - protein, 17 aa, Artificial Sequence
  Made in lab
TWDYYDSSGYFNDAFDI

SEQ ID NO: 924 - protein, 5 aa, Artificial Sequence
  Made in lab
AYNMA

SEQ ID NO: 925 - protein, 17 aa, Artificial Sequence
  Made in lab
SIVSSGGTTTYADSVKG

SEQ ID NO: 926 - protein, 9 aa, Artificial Sequence
  Made in lab
GGVGWLLDY

SEQ ID NO: 927 - protein, 5 aa, Artificial Sequence
  Made in lab
AYQMG

SEQ ID NO: 928 - protein, 17 aa, Artificial Sequence
  Made in lab
SISSSGGYTSYADSVKG

SEQ ID NO: 929 - protein, 8 aa, Artificial Sequence
  Made in lab
ESRYYFDY

SEQ ID NO: 930 - protein, 5 aa, Artificial Sequence
  Made in lab
EYPMI

SEQ ID NO: 931 - protein, 17 aa, Artificial Sequence
  Made in lab
GIGSSGGSTTYADSVKG

SEQ ID NO: 932 - protein, 13 aa, Artificial Sequence
  Made in lab
APLYSSTSYAFDI

SEQ ID NO: 933 - protein, 5 aa, Artificial Sequence
  Made in lab
FYWMI

SEQ ID NO: 934 - protein, 17 aa, Artificial Sequence
  Made in lab
GIGPSGGTTFYADSVKG

SEQ ID NO: 935 - protein, 7 aa, Artificial Sequence
  Made in lab
GGSYFDL

SEQ ID NO: 936 - protein, 5 aa, Artificial Sequence
  Made in lab
GYGMV

SEQ ID NO: 937 - protein, 17 aa, Artificial Sequence
  Made in lab
SISPSGGETLYADSVKG

SEQ ID NO: 938 - protein, 11 aa, Artificial Sequence
  Made in lab
GQMWPGVAFEM

SEQ ID NO: 939 - protein, 5 aa, Artificial Sequence
  Made in lab
LYFMT

SEQ ID NO: 940 - protein, 17 aa, Artificial Sequence
  Made in lab
SIGSSDGYTRYADSVKG

SEQ ID NO: 941 - protein, 11 aa, Artificial Sequence
  Made in lab
DLSWWPDAFDI

SEQ ID NO: 942 - protein, 5 aa, Artificial Sequence
  Made in lab
PYRME

SEQ ID NO: 943 - protein, 17 aa, Artificial Sequence
  Made in lab
WIYSSGGITNYADSVKG

SEQ ID NO: 944 - protein, 5 aa, Artificial Sequence
  Made in lab
VYDMV

SEQ ID NO: 945 - protein, 17 aa, Artificial Sequence
  Made in lab
SIGPSGGWTGYADSVKG

SEQ ID NO: 946 - protein, 16 aa, Artificial Sequence
  Made in lab
DSGGWEALYYYYYMDV

SEQ ID NO: 947 - protein, 5 aa, Artificial Sequence
  Made in lab
VYFMD

SEQ ID NO: 948 - protein, 17 aa, Artificial Sequence
  Made in lab
GIGPSGGVTSYADSVKG

SEQ ID NO: 949 - protein, 12 aa, Artificial Sequence
  Made in lab
GQLAQGHYYMDV

SEQ ID NO: 950 - protein, 5 aa, Artificial Sequence
  Made in lab
KYDML

SEQ ID NO: 951 - protein, 17 aa, Artificial Sequence
  Made in lab
YIYPSGGLTEYADSVKG

SEQ ID NO: 952 - protein, 10 aa, Artificial Sequence
  Made in lab
RAPRSLSFDI

SEQ ID NO: 953 - protein, 5 aa, Artificial Sequence
  Made in lab
RYMMA

SEQ ID NO: 954 - protein, 17 aa, Artificial Sequence
  Made in lab
SIYPSGGVTEYADSVKG

SEQ ID NO: 955 - protein, 8 aa, Artificial Sequence
  Made in lab
EGWYGYPT

SEQ ID NO: 956 - protein, 5 aa, Artificial Sequence
  Made in lab
RYMMG

SEQ ID NO: 957 - protein, 17 aa, Artificial Sequence
  Made in lab
VIVPSGGFTMYADSVKG

SEQ ID NO: 958 - protein, 13 aa, Artificial Sequence
  Made in lab
SSRLWSGYYPFDY

SEQ ID NO: 959 - protein, 5 aa, Artificial Sequence
  Made in lab
RYSMT

SEQ ID NO: 960 - protein, 17 aa, Artificial Sequence
  Made in lab
SIYSSGGETGYADSVKG

SEQ ID NO: 961 - protein, 8 aa, Artificial Sequence
  Made in lab
ERYNSFTS

SEQ ID NO: 962 - protein, 5 aa, Artificial Sequence
  Made in lab
SYVMV

SEQ ID NO: 963 - protein, 17 aa, Artificial Sequence
  Made in lab
VISPSGGVTFYADSVKG

SEQ ID NO: 964 - protein, 10 aa, Artificial Sequence
  Made in lab
DRRSNSLFDP

SEQ ID NO: 965 - protein, 5 aa, Artificial Sequence
  Made in lab
TYGMV

SEQ ID NO: 966 - protein, 17 aa, Artificial Sequence
  Made in lab
YIWPSGGLTWYADSVKG

SEQ ID NO: 967 - protein, 10 aa, Artificial Sequence
  Made in lab
SGYSYGRFDY

SEQ ID NO: 968 - protein, 5 aa, Artificial Sequence
  Made in lab
YYDMG

SEQ ID NO: 969 - protein, 17 aa, Artificial Sequence
  Made in lab
WISPSGGSTLYADSVKG

SEQ ID NO: 970 - protein, 14 aa, Artificial Sequence
  Made in lab
SGLYGSGSYAAFDV

SEQ ID NO: 971 - protein, 5 aa, Artificial Sequence
  Made in lab
YYHMV

SEQ ID NO: 972 - protein, 17 aa, Artificial Sequence
  Made in lab
YISPSGGDTHYADSVKG

SEQ ID NO: 973 - protein, 8 aa, Artificial Sequence
  Made in lab
GRYYGMDV

SEQ ID NO: 974 - protein, 5 aa, Artificial Sequence
  Made in lab
GYIMM

SEQ ID NO: 975 - protein, 17 aa, Artificial Sequence
  Made in lab
GIYPSGGGTDYADSVKG

SEQ ID NO: 976 - protein, 20 aa, Artificial Sequence
  Made in lab
ERPGYYDSTDDDYYYYPMDV

SEQ ID NO: 977 - protein, 5 aa, Artificial Sequence
  Made in lab
VYWME

SEQ ID NO: 978 - protein, 17 aa, Artificial Sequence
  Made in lab
SISSSGGLTSYADSVKG

SEQ ID NO: 979 - protein, 11 aa, Artificial Sequence
  Made in lab
DLVSNWPWGGY

SEQ ID NO: 980 - protein, 5 aa, Artificial Sequence
  Made in lab
HYKMG

SEQ ID NO: 981 - protein, 17 aa, Artificial Sequence
  Made in lab
SISSSGGDTAYADSVKG

SEQ ID NO: 982 - protein, 16 aa, Artificial Sequence
  Made in lab
DRAPYYYDSSGYYSDY

SEQ ID NO: 983 - protein, 5 aa, Artificial Sequence
  Made in lab
HYAMY

SEQ ID NO: 984 - protein, 17 aa, Artificial Sequence
  Made in lab
SISPSGGYTYYADSVKG

SEQ ID NO: 985 - protein, 10 aa, Artificial Sequence
  Made in lab
ESGTTNAFDI

SEQ ID NO: 986 - protein, 5 aa, Artificial Sequence
  Made in lab
NYHME

SEQ ID NO: 987 - protein, 17 aa, Artificial Sequence
  Made in lab
YISPSGGSTHYADSVKG

SEQ ID NO: 988 - protein, 8 aa, Artificial Sequence
  Made in lab
DGWTVPRD

SEQ ID NO: 989 - protein, 5 aa, Artificial Sequence
  Made in lab
RYWMA

SEQ ID NO: 990 - protein, 17 aa, Artificial Sequence
  Made in lab
SIVSSGGMTDYADSVKG

SEQ ID NO: 991 - protein, 9 aa, Artificial Sequence
  Made in lab
HRGDSGLDY

SEQ ID NO: 992 - protein, 5 aa, Artificial Sequence
  Made in lab
HYPML

SEQ ID NO: 993 - protein, 17 aa, Artificial Sequence
  Made in lab
GISSSGGWTDYADSVKG

SEQ ID NO: 994 - protein, 8 aa, Artificial Sequence
  Made in lab
DRALGMDV

SEQ ID NO: 995 - protein, 5 aa, Artificial Sequence
  Made in lab
LYSMV

SEQ ID NO: 996 - protein, 17 aa, Artificial Sequence
  Made in lab
RIRPSGGQTMYADSVKG

SEQ ID NO: 997 - protein, 6 aa, Artificial Sequence
  Made in lab
GYAFDI

SEQ ID NO: 998 - protein, 5 aa, Artificial Sequence
  Made in lab
FYDML

SEQ ID NO: 999 - protein, 17 aa, Artificial Sequence
  Made in lab
SIWSSGGQTGYADSVKG

SEQ ID NO: 1000 - protein, 16 aa, Artificial Sequence
  Made in lab
EKASDLSGSYSEALDY

SEQ ID NO: 1001 - protein, 5 aa, Artificial Sequence
  Made in lab
NYHMN

SEQ ID NO: 1002 - protein, 17 aa, Artificial Sequence
  Made in lab
YIYPSGGVTYYADSVKG

SEQ ID NO: 1003 - protein, 16 aa, Artificial Sequence
  Made in lab
GIAAAGNYYYYYGMDV

SEQ ID NO: 1004 - protein, 5 aa, Artificial Sequence
  Made in lab
KYGMV

SEQ ID NO: 1005 - protein, 17 aa, Artificial Sequence
  Made in lab
SISSSGGNTAYADSVKG

SEQ ID NO: 1006 - protein, 15 aa, Artificial Sequence
  Made in lab
GELERRRRNYYGMDV

SEQ ID NO: 1007 - protein, 5 aa, Artificial Sequence
  Made in lab
NYAMT

SEQ ID NO: 1008 - protein, 17 aa, Artificial Sequence
  Made in lab
SIYSSGGDTAYADYVKG

SEQ ID NO: 1009 - protein, 10 aa, Artificial Sequence
  Made in lab
EYYTGWNFDY

SEQ ID NO: 1010 - protein, 5 aa, Artificial Sequence
  Made in lab
QYDMV

SEQ ID NO: 1011 - protein, 17 aa, Artificial Sequence
  Made in lab
YIYSSGGHTLYVDSVKG

SEQ ID NO: 1012 - protein, 13 aa, Artificial Sequence
  Made in lab
IRSSGYYHEVLDY

SEQ ID NO: 1013 - protein, 5 aa, Artificial Sequence
  Made in lab
TYMMY

SEQ ID NO: 1014 - protein, 17 aa, Artificial Sequence
  Made in lab
VIGPSGGATGYADSVKG

SEQ ID NO: 1015 - protein, 14 aa, Artificial Sequence
  Made in lab
IRKAFGYGSGSLDY

SEQ ID NO: 1016 - protein, 5 aa, Artificial Sequence
  Made in lab
YYDMQ

SEQ ID NO: 1017 - protein, 17 aa, Artificial Sequence
  Made in lab
YIGPSGGDTDYADSVKG

SEQ ID NO: 1018 - protein, 17 aa, Artificial Sequence
  Made in lab
SSYYYDSSGYYHEAFDI

SEQ ID NO: 1019 - protein, 5 aa, Artificial Sequence
  Made in lab
YYMMR

SEQ ID NO: 1020 - protein, 17 aa, Artificial Sequence
  Made in lab
YIGPSGGATTYADSVKG

SEQ ID NO: 1021 - protein, 18 aa, Artificial Sequence
  Made in lab
GRSVKYYYDSSGYLLFDY

SEQ ID NO: 1022 - protein, 5 aa, Artificial Sequence
  Made in lab
HYSMY

SEQ ID NO: 1023 - protein, 17 aa, Artificial Sequence
  Made in lab
GIYSSGGPTIYADSVKG

SEQ ID NO: 1024 - protein, 13 aa, Artificial Sequence
  Made in lab
LQIEMATIGHFDY

SEQ ID NO: 1025 - protein, 5 aa, Artificial Sequence
  Made in lab
QYDMV

SEQ ID NO: 1026 - protein, 17 aa, Artificial Sequence
  Made in lab
YIYSSGGHTLYVDSVKG

SEQ ID NO: 1027 - protein, 13 aa, Artificial Sequence
  Made in lab
IRSSGYYHEVLDY

SEQ ID NO: 1028 - protein, 5 aa, Artificial Sequence
  Made in lab
HYWMM

SEQ ID NO: 1029 - protein, 17 aa, Artificial Sequence
  Made in lab
SIVPSGGDTYYADSVKG

SEQ ID NO: 1030 - protein, 9 aa, Artificial Sequence
  Made in lab
DPVMTPVDY

SEQ ID NO: 1031 - protein, 5 aa, Artificial Sequence
  Made in lab
PYFMN

SEQ ID NO: 1032 - protein, 17 aa, Artificial Sequence
  Made in lab
SIYPSGGITKYADSVKG

SEQ ID NO: 1033 - protein, 14 aa, Artificial Sequence
  Made in lab
ETYYYGSGSYAFDI

SEQ ID NO: 1034 - protein, 5 aa, Artificial Sequence
  Made in lab
QYYMY

SEQ ID NO: 1035 - protein, 17 aa, Artificial Sequence
  Made in lab
RISPSGGMTSYADSVKG

SEQ ID NO: 1036 - protein, 8 aa, Artificial Sequence
  Made in lab
HKYGGPDF

SEQ ID NO: 1037 - protein, 5 aa, Artificial Sequence
  Made in lab
RYQMN

SEQ ID NO: 1038 - protein, 17 aa, Artificial Sequence
  Made in lab
SIRSSGGVTKYADSVKG

SEQ ID NO: 1039 - protein, 6 aa, Artificial Sequence
  Made in lab
GRGLSS

SEQ ID NO: 1040 - protein, 5 aa, Artificial Sequence
  Made in lab
LYTMA

SEQ ID NO: 1041 - protein, 17 aa, Artificial Sequence
  Made in lab
YISPSGGFTGYADSVKG

SEQ ID NO: 1042 - protein, 4 aa, Artificial Sequence
  Made in lab
WGDP

SEQ ID NO: 1043 - protein, 5 aa, Artificial Sequence
  Made in lab
DYFMG

SEQ ID NO: 1044 - protein, 17 aa, Artificial Sequence
  Made in lab
RISSSGGHTMYADSVKG

SEQ ID NO: 1045 - protein, 17 aa, Artificial Sequence
  Made in lab
EEDYYDSSGYYPPAFDI

SEQ ID NO: 1046 - protein, 5 aa, Artificial Sequence
  Made in lab
IYWMY

SEQ ID NO: 1047 - protein, 17 aa, Artificial Sequence
  Made in lab
GIGPSGGYTSYADSVKG

SEQ ID NO: 1048 - protein, 7 aa, Artificial Sequence
  Made in lab
GNGGFDS

SEQ ID NO: 1049 - protein, 5 aa, Artificial Sequence
  Made in lab
PYHMS

SEQ ID NO: 1050 - protein, 17 aa, Artificial Sequence
  Made in lab
SIYPSGGFTAYADSVKG

SEQ ID NO: 1051 - protein, 15 aa, Artificial Sequence
  Made in lab
ESAYYYDSSPPAFDI

SEQ ID NO: 1052 - protein, 5 aa, Artificial Sequence
  Made in lab
TYAMY

SEQ ID NO: 1053 - protein, 17 aa, Artificial Sequence
  Made in lab
SIYSSGGATWYADSVKG

SEQ ID NO: 1054 - protein, 8 aa, Artificial Sequence
  Made in lab
STFDYFDY

SEQ ID NO: 1055 - protein, 5 aa, Artificial Sequence
  Made in lab
KYRMM

SEQ ID NO: 1056 - protein, 17 aa, Artificial Sequence
  Made in lab
YISSSGGATIYADSVKG

SEQ ID NO: 1057 - protein, 12 aa, Artificial Sequence
  Made in lab
HGPQIAAWYFDL

SEQ ID NO: 1058 - protein, 5 aa, Artificial Sequence
  Made in lab
PYSMD

SEQ ID NO: 1059 - protein, 17 aa, Artificial Sequence
  Made in lab
GISSSGGRTVYADSVKG

SEQ ID NO: 1060 - protein, 19 aa, Artificial Sequence
  Made in lab
GPYYDFWSGYYIDRGPLDY

SEQ ID NO: 1061 - protein, 5 aa, Artificial Sequence
  Made in lab
WYMMA

SEQ ID NO: 1062 - protein, 17 aa, Artificial Sequence
  Made in lab
WISSSGGFTPYADSVKG

SEQ ID NO: 1063 - protein, 11 aa, Artificial Sequence
  Made in lab
GQQWPGVAFDI

SEQ ID NO: 1064 - protein, 5 aa, Artificial Sequence
  Made in lab
FYPMM

SEQ ID NO: 1065 - protein, 15 aa, Artificial Sequence
  Made in lab
YIGPSGGNNADSVKG

SEQ ID NO: 1066 - protein, 10 aa, Artificial Sequence
  Made in lab
GLWFGGRLDY

SEQ ID NO: 1067 - protein, 5 aa, Artificial Sequence
  Made in lab
HYWMK

SEQ ID NO: 1068 - protein, 17 aa, Artificial Sequence
  Made in lab
GISSSGGQTDYADSVKG

SEQ ID NO: 1069 - protein, 18 aa, Artificial Sequence
  Made in lab
SPRLRFLEWPRNYYGMDV

SEQ ID NO: 1070 - protein, 5 aa, Artificial Sequence
  Made in lab
LYMMV

SEQ ID NO: 1071 - protein, 15 aa, Artificial Sequence
  Made in lab
YIGPSGGAYADSVKG

SEQ ID NO: 1072 - protein, 9 aa, Artificial Sequence
  Made in lab
SVRGLTFDY

SEQ ID NO: 1073 - protein, 5 aa, Artificial Sequence
  Made in lab
PYEMG

SEQ ID NO: 1074 - protein, 17 aa, Artificial Sequence
  Made in lab
RISPSGGMTLYADSVKG

SEQ ID NO: 1075 - protein, 14 aa, Artificial Sequence
  Made in lab
MGRGGWWAFDAFDI

SEQ ID NO: 1076 - protein, 5 aa, Artificial Sequence
  Made in lab
WYKMV

SEQ ID NO: 1077 - protein, 17 aa, Artificial Sequence
  Made in lab
GIYPSGGTTHYADSVKG

SEQ ID NO: 1078 - protein, 14 aa, Artificial Sequence
  Made in lab
GGGDFWSGYYPFDY

SEQ ID NO: 1079 - protein, 108 aa, Artificial Sequence
  Made in lab
QSALTQDPAVSVALGQTVRFTCQGDSLRNYHPSWYQQKPGQAPVLVIYGKNNRPSGIPDRFSGSTSGDTASLTITGAQAEDEADYYCNSRDSSGNLVFFAGGTKLTVL

SEQ ID NO: 1080 - protein, 106 aa, Artificial Sequence
  Made in lab
QYELTQPPSVSVSPGQTASITCSGDKLGDKYASWYQQKPDQSPVLVIYQDRKRPSGIPERFSGSNSGNTATLTISGTQAMDEADYYCQAWDSNTVVFGGGTKLTVL

SEQ ID NO: 1081 - protein, 110 aa, Artificial Sequence
  Made in lab
QSALTQSPSASGTPGQTVTISCSGSSSNIGSDYVHWYQHLPGTAPKLLIYRNNKRPSGVPDRFSGSKSGTSASLAISGLRSEDEADYYCAAWDDSLNGWVFGGGTKLTVL

SEQ ID NO: 1082 - protein, 106 aa, Artificial Sequence
  Made in lab
QYELTQPPSVSVSPGQTASITCSGDKLGDKYASWYQQRPGQSPVVIIYEDNKRPSGIPERFSGSNSGNTATLTISGTQTMDEADYYCQTWASGTVLFGGGTKLTVL

SEQ ID NO: 1083 - protein, 110 aa, Artificial Sequence
  Made in lab
QYELTQPPSASGTPGQRVTISCSGSSSNIGSNTVNWYQQLPGTAPKLLIYANNQRPSGVPDRFSGSKSGTSASLAISGLQSEDEADYYCAVWDDSLNAWVFGGGTKLTVL

SEQ ID NO: 1084 - protein, 107 aa, Artificial Sequence
  Made in lab
QYELTQPPSVSVSPGQTARITCSGDKLENKYTSWYQQKPGQSPVLVIYEDIERPSGIPERFSGSNSGNTATLTISGTQAMDEADYYCQAWDSNIAVVFGGGTKLTVL

SEQ ID NO: 1085 - protein, 110 aa, Artificial Sequence
  Made in lab
QSALTQPPSASETPGQRVTISCSGGNSNIGSHYVYWYQQLPGTAPKLLIYRDNQRPSGVPDRFSGSKSGTSASLAFSGLRSEDEADYYCAAWDDSLGGPVFGGGTKLTVL

SEQ ID NO: 1086 - protein, 110 aa, Artificial Sequence
  Made in lab
QSVLTQPPSASGTPGQRVTISSSGSSSNIGRNAVNWYQQLPGTAPKLLIYNNNQRPSGVPDRFSASKSGTSASLAISGLQSEDEADYYCAAWDDSLNGWVFGGGTKLTVL

SEQ ID NO: 1087 - protein, 108 aa, Artificial Sequence
  Made in lab
QYELTQAPSVSVAPGQTATISCGGNNIGDKSVHWYRQRPGQAPMVVIYEDKNRPAGIPERLSGSNSENTATLTINRVEAEDEADYFCQVWDSSTDHHVFGGGTKLTVL

SEQ ID NO: 1088 - protein, 106 aa, Artificial Sequence
  Made in lab
QYELTQPPSVSVAPGKTATITCGGNNIGTTSVQWYQQKPGQAPVLIIYYGSDRPSRIPERFSGSNSGNTATLTISGAQPVDEADYICQTWVKGAGIFGGGTKLTVL

SEQ ID NO: 1089 - protein, 108 aa, Artificial Sequence
  Made in lab
QDIQMTQSPSSLSASVGDRVTITCRASQSIRNYLNWYQQEPGKAPKLLIYAASSLQSGVPSRFSGSGSGTDFILTISSLQPEDFATYYCQQSYVTPLTFGGGTKVEIK

SEQ ID NO: 1090 - protein, 107 aa, Artificial Sequence
  Made in lab
QDIQMTQSPSSLSASLGDRVTITCRASQSVNSLNWYQQRRGEAPKLLISGISSLRRGVPSRFSGSRSGTDFILTISSLEPEDFATYFCQQSHSVPLTFGGGTKVEIK

SEQ ID NO: 1091 - protein, 108 aa, Artificial Sequence
  Made in lab
QDIQMTQSPSSLSASVGDRVTITCRASQGIRNDLGWYQQKPGKAPKRLIYAASSLQSGVPSRFSGSGSGTEFTLTISSLQPEDFATYYCLQHNSYPPTFGGGTKVEIK

SEQ ID NO: 1092 - protein, 108 aa, Artificial Sequence
  Made in lab
QDIQMTQSPATLSLSPGERATLSCRASQSVSSDLAWYQQKPGQAPRLLIYDAFKRATGIPARFSGSGSGTDFTLTISSLEPEDFAVYYCQQRSNWPLTFGGGTKVEIK

SEQ ID NO: 1093 - protein, 108 aa, Artificial Sequence
  Made in lab
QDIQMTQSPATLSLSPGERATLSCRASQSVSSYLAWYQQKPGQAPRLLIYDASNRATGIPARFSGSGSGTDFTLTISSLEPEDFAVYYCQQRSNWPLTFGGGTKVEIK

SEQ ID NO: 1094 - protein, 113 aa, Artificial Sequence
  Made in lab
QDIQMTQSPLSLPVIPGEPASISCRSSQSLLYSNGYNYLDWYLQKPGQSPQLLIYLGSNRASGVPDRFSGSGSGTDFTLKISRVEAEDVGVYYCMQALQSPLTFGGGTKVEIK

SEQ ID NO: 1095 - protein, 105 aa, Artificial Sequence
  Made in lab
QDIQMTQSPGTLSLSPGERATLSCRASQSVSSSYLAWYQQKPGQAPRLLIYGASSRATGIPDRFSGSGSGTDFTLTISSLEPEDFAVYYCQQRSIFGGGTKVEIK

SEQ ID NO: 1096 - protein, 108 aa, Artificial Sequence
  Made in lab
QDIQMTQSPATLSVSPGERVTLSCRTSQYIRTNLAWYQQKPGQPPRLLIRDGSNRATGIPARFTGSGSGTEFTLTISSLEPEDFAVYYCQQRSNWPLTFGGGTKVEIK

SEQ ID NO: 1097 - protein, 108 aa, Artificial Sequence
  Made in lab
QDIQMTQSPSSLSASVGDRVTITCRTSQQIMTYLNWYQQKPGKAPKLLIYVASRLQGGVPSRFSGSGSGTDFTLTISSLQPDDFATYYCQQSFWTPLTFGGGTKVEIR

SEQ ID NO: 1098 - protein, 108 aa, Artificial Sequence
  Made in lab
QDIQMTQSPDSLSASVGDTITISCQASQDIDNYLNWYQQRSGKAPKLLIYDAYNLKAGVPSRFRGSRSGTDFFLTISSLQPEDFATYYCQVFDDLSVTFGGGTKVEIR

SEQ ID NO: 1099 - protein, 108 aa, Artificial Sequence
  Made in lab
QDIQMTQSPSSLSVSVGDRVTITCRASQGIKNDLGWYQQRPGKAPKLLIYAASSLQSGVPSRFSGSGSGTDFTLTISSLQPEDFATYYCQQSNSFPLTFGGGTKVEVK

SEQ ID NO: 1100 - protein, 108 aa, Artificial Sequence
  Made in lab
QDIQMTQSPSSLSASVGDRVTITCQASHDINNYLNWYQQKPGKAPNVLIYDASNLQSGVPSRFSGSGSGTDFTFTISSLQPEDFATYYCQQYDTLPVTFGGGTKVQTK

SEQ ID NO: 1101 - protein, 110 aa, Artificial Sequence
  Made in lab
QSALTQPPSASGTPGQRVTISCAGSSSNIGSNSVYWYQQLPGTAPRLLLYSNNKRPSGVPDRFSGSKSGTSASLAISGLRSEDDGDYYCAAWDDSLRSVVFGGGTQLTVL

SEQ ID NO: 1102 - protein, 110 aa, Artificial Sequence
  Made in lab
QSALTQPPSVSGTPGQKVTISCSGSSSTIGSNFVNWYQQLPGTAPKLLIYTNNQRPSGVPDRFSGSKSGTSASLAISGLQSEDEADYYCATWDDNLLGPVFGGGTRLAVL

SEQ ID NO: 1103 - protein, 108 aa, Artificial Sequence
  Made in lab
QDIQMTQSPSSVSASVGDRVTITCRASEGISSRLAWYQQKPGKAPKVLIYATSSLQSGVPSRFSGSGSGTDFTLTISGLQPEDFASYYCLQANTLPLTFGGGTRVEIK

SEQ ID NO: 1104 - protein, 108 aa, Artificial Sequence
  Made in lab
QDIQMTQSPSSLSASVGDRVTITCRASLGVSNYLAWLQQKPGKAPKSLIYAASILQTGVPSKFSGSGSGTDFTLTISNLQPDDSATYYCQHYQGYPYTFGNGTKLEIR

SEQ ID NO: 1105 - protein, 109 aa, Artificial Sequence
  Made in lab
QDIQMTQSPSSLSASVGDRVAITCRASQSIDTYLNWYQQKPGKAPKLLIYAASKLEDGVPSRFSGSGTGTDFTLTIRSLQPEDFASYFCQQSYSSPGITFGPGTKVEIK

SEQ ID NO: 1106 - protein, 108 aa, Artificial Sequence
  Made in lab
QDIQMTQSPSSLSASVGDRVTITCQASQDISDYLNWYQQKPGKAPKLLIYDASNLETGVTSRFSGSGYGTDFTLTISSLQPEDIATYFCQQNDNLPFTFGPGTKVHIK

SEQ ID NO: 1107 - protein, 108 aa, Artificial Sequence; identical to SEQ ID NO: 414
  Made in lab

SEQ ID NO: 1108 - protein, 108 aa, Artificial Sequence
  Made in lab
QDIQMTQSPSSLSASVGDRVTITCRAGQAIRNNLGWYQQKPGKAPNRLIYAASSLQSGVPSRFSGSGSGTDFTLTISSLQPEDFATYYCLQHNSFPYTFGQGTKLEIK

SEQ ID NO: 1109 - protein, 108 aa, Artificial Sequence
  Made in lab
QDIQMTQSPSSLSASVGDRVTITCQASQDIINYLNWYQQKPGKAPKLLIYDASNLETGVPSRFSGGGSGTDFTFTISSLQPEDIATYYCQQYDNLPYTFGQGTKLEIK

SEQ ID NO: 1110 - protein, 109 aa, Artificial Sequence
  Made in lab
QDIQMTQSPGTLSLSPGERATLSCRATQSVRHNYLAWYQQRPGQAPRLLIFGAFFRATGIPDRFSGRGSETDFTLTIDRLEPEDFAVYYCQQYGSSPVTFGQGTKLEIK

SEQ ID NO: 1111 - protein, 108 aa, Artificial Sequence
  Made in lab
QDIQMTQSPSSLSASVGDRVTITCRASQSISSYLNWYQQKPGKAPKLLIYAASSLQSGVPSRFSGSGSGTDFTLTISSLQPEDFATYYCQQSYSTSYTFGQGTKLEIK

SEQ ID NO: 1112 - protein, 110 aa, Artificial Sequence
  Made in lab
QDIQMTQSPGTLSLFPGERATLSCRASQSVSSRYLAWYQQRFGQAPRLLIYAASSRATGIPDRFSGSGSGTDFTLTISRLEPEDSAFYYCQQYGSSPPYTFGQGTKLEIK

SEQ ID NO: 1113 - protein, 107 aa, Artificial Sequence
  Made in lab
QDIQMTQSPGTLSVSPGERATLSCRASQSVSFSLAWYQQKPGQAPRLLIYDTSNRVAGIPARFSGSGAGTDFTLSISTLEPEDFAVYYCQHRSNWPGFGQGTKLELK

SEQ ID NO: 1114 - protein, 108 aa, Artificial Sequence
  Made in lab
QDIQMTQSPSSLSASVGDRVTITCQASQDIINYLNWYQQKPGKAPKLLIYDASNLETGVPSRFSGGGSGTDFTFTISSLQPEDIATYYCQQYDNLPYTFGQGTKLENK

SEQ ID NO: 1115 - protein, 108 aa, Artificial Sequence
  Made in lab
QDIQMTQSPSSLSASVGDRVTITCQASQHISKYLNWYQQQPGKAPKLLIYDASNLETGVPSRFSGSGSGTDFTFTISSLQPEDIATYYCQQYDNLPLTFGQGTKVEIK

SEQ ID NO: 1116 - protein, 108 aa, Artificial Sequence
  Made in lab
QDIQMTQSPSSLSASVGDTVTITCRASQSIGSYLNWYQEKSGKAPKLLIYAATSLHTGVPSRFSGSGSGAEFTLTINGLQPEDSATYYCQQYDNYPLTFGQGTKVEIK

SEQ ID NO: 1117 - protein, 108 aa, Artificial Sequence
  Made in lab
QDIQMTQSPSSLSASVGDRVTITCRASQGIRNDLGWYQQKPGKAPKRLIYAASSLQSGVPSRFSGSGSGTEFTLTISSLQPEDFATYYCLQHNSYPRTFGQGTKVEIK

SEQ ID NO: 1118 - protein, 108 aa, Artificial Sequence
  Made in lab
QDIQMTQSPATLSVSPGERATLSCRASQSVSSNLAWYQQKPGQAPRLLIYGASTRATGIPARFSGSGSGTEFTLTISSLQSEDFAVYYCQQYNNWPRTFGQGTKVEIK

SEQ ID NO: 1119 - protein, 108 aa, Artificial Sequence
  Made in lab
QDIQMTQSPSSLSASVGDRVTITCRASQRIINYVSWFQQKPGKAPKLLIYGASTLQTGVPSRFTGSGSGTDFTLTITSLQPEDFATYYCRQSYSSPLTFGQGTKVEIR

SEQ ID NO: 1120 - protein, 108 aa, Artificial Sequence
  Made in lab
QDIQMTQSPSSLSASVGDRVTITCRASQTITTSLNWYQQKPGKAPKLLIDAASRLQNGVPSRFSGTGSGTHFTLTVSSLQPEDFATYYCQQSYNIPYTFGQGTNLDMK

SEQ ID NO: 1121 - protein, 108 aa, Artificial Sequence
  Made in lab
QDIQMTQSPSSLSASVGDRVTITCRASQSIGSYLNWYQQKPGKAPRLLISDASNLQSGVPSRFSGSGSGTDFTLTIASLQPDDFATYHCQQSYRLFPTFGQGTRLEIK

SEQ ID NO: 1122 - protein, 108 aa, Artificial Sequence
  Made in lab
QDIQMTQSPSSVSASVGDRVTITCQASQGIYNYVNWYQQKPGKAPKLLIYDASNLETGVPPRFSGSGSGTDFTFTITSLQPEDTATYYCQQYDDVPITFGQGTRLEIK

SEQ ID NO: 1123 - protein, 108 aa, Artificial Sequence
  Made in lab
QDIQMTQSPSSVSASVGDRVTITCRASQGISSWLAWYQQKPGKAPKLLIYAASSLQSGVPSRFSGSGSGTDFTLTISSLQPEDFATYYCQQANSFPITFGQGTRLEIK

SEQ ID NO: 1124 - protein, 108 aa, Artificial Sequence
  Made in lab
QDIQMTQSPSSLSASVGDRVTISCRSSQSIAKYLTWYQQKAGKAPKLLIFAASELQSGVPSRFSGSGSGTDYTLTITSLQPEDFVTYYCQQTYSFPHTFGQGTSLRIK

SEQ ID NO: 1125 - protein, 108 aa, Artificial Sequence
  Made in lab
QYELTQPPSVSVAPGQTAKITCAGNNIGSKSVHWYQQRPGQAPVLVVYDDSDRPPGIPERLSGSNSENTATLTISRVEAGDEADYYCQVWDSDSDHYVFGSGTKVTVL

SEQ ID NO: 1126 - protein, 105 aa, Artificial Sequence
  Made in lab
QYELTQPPSVSVSPGQTASITCSGDRLGDKYASWYQQKPGQAPVLVVYDDSERPSGIPERFSGSNSGNTAALTIGRVEAGDEADYYCQVWDSSIVFGSGTKVTVL

SEQ ID NO: 1127 - protein, 110 aa, Artificial Sequence
  Made in lab
QSVLTQPRSVSGSLGQSVTISCTGSTSDVGGYTYVSWYQQEPGKAPKLMIHDVSKRPSGVPDRFSGSKSGNTASLIISGLQAEDEADYYCCSYAGSYSYVFGTGTKVTVL

SEQ ID NO: 1128 - protein, 106 aa, Artificial Sequence
  Made in lab
QYELTQPPSVSVSPGQTASITCSGDKLGDKYACWYQQKPGQSPVLVIYQDSKRPSGIPERFSGSNSGNTATLTISGTQAMDEADYYCQAWDSSTYVFGTGTKVTVL

SEQ ID NO: 1129 - protein, 110 aa, Artificial Sequence
  Made in lab
QSALTQPRSVSGSPGQSVTISCTGTSSDVGGHNYVSWYQQHPGKAPKLMIYDVSKRPSGVPDRFSGSKYGNTASLTISGLQAEDEADFYCCSYAGRYTYVFGTGTKVTVL

SEQ ID NO: 1130 - protein, 107 aa, Artificial Sequence
  Made in lab
QYELTQPPSVSVSPGQTASITCSGDRLEDKYTSWYQQKPGQSPLLVIYQDNKRPSGIPERFSGSNSGNTATLTISGTQAMDEADYFCQAWDSSSAYVFGTGTKVTVL

SEQ ID NO: 1131 - protein, 108 aa, Artificial Sequence
  Made in lab
QSALTQQPSVSVAPGKTATITCGGNNIGSKSVHWYQQRPGQAPVVVMFFDYDRPSGIPDRFSGSNSGDTATLTISRVEAGDEADYYCQVWDSRTDRYVFGTGTTVTVL

SEQ ID NO: 1132 - protein, 126 aa, Artificial Sequence
  Made in lab
EVQLLESGGGLVQPGGSLRLSCAASGFTFSIYDMHWVRQAPGKGLEWVSWISPSGGRTLYADSVKGRFTISRDNSKNTLYLQMNSLRAEDTAVYYCARTWDYYDSSGYFNDAFDIWGQGTMVTVSS

SEQ ID NO: 1133 - protein, 118 aa, Artificial Sequence
  Made in lab
EVQLLESGGGLVQPGGSLRLSCAASGFTFSAYNMAWVRQAPGKGLEWVSSIVSSGGTTTYADSVKGRFTISRDNSKNTLYLQMNSLRAEDTAVYYCARGGVGWLLDYWGQGTLVTVSS

SEQ ID NO: 1134 - protein, 117 aa, Artificial Sequence
  Made in lab
EVQLLESGGGLVQPGGSLRLSCAASGFTFSAYQMGWVRQAPGKGLEWVSSISSSGGYTSYADSVKGRFTISRDNSKNTLYLQMNSLRAEDTAVYYCARESRYYFDYWGQGTLVTVSS

SEQ ID NO: 1135 - protein, 122 aa, Artificial Sequence
  Made in lab
EVQLLESGGGLVQPGGSLRLSCAASGFTFSEYPMIWVRQAPGKGLEWVSGIGSSGGSTTYADSVKGRFTISRDNSKNTLYLQMNSLRAEDTAVYYCARAPLYSSTSYAFDIWGQGTMVTVSS

SEQ ID NO: 1136 - protein, 116 aa, Artificial Sequence
  Made in lab
EVQLLESGGGLVQPGGSLRLSCAASGFTFSFYWMIWVRQAPGKGLEWVSGIGPSGGTTFYADSVKGRFTISRDNSKNTLYLQMNSLRAEDTAVYYCARGGSYFDLWGRGTLVTVSS

SEQ ID NO: 1137 - protein, 120 aa, Artificial Sequence
  Made in lab
EVQLLESGGGLVQPGGSLRLSCAASGFTFSGYGMVWVRQAPGKGLEWVSSISPSGGETLYADSVKGRFTISRDNSKNTLYLQMNSLRAEDTAVYYCARGQMWPGVAFEMWGQGTMVTVSS

SEQ ID NO: 1138 - protein, 120 aa, Artificial Sequence
  Made in lab
EVQLLESGGGLVQPGGSLRLSCAASGFTFSLYFMTWVRQAPGKGLEWVSSIGSSDGYTRYADSVKGRFTISRDNSKNTLYLQMNSLRAEDTAVYYCARDLSWWPDAFDIWGQGTMVTVSS

SEQ ID NO: 1139 - protein, 104 aa, Artificial Sequence
  Made in lab
EVQLLESGGGLVQPGGSLRLSCAASGFTFSPYRMEWVRQAPGKGLEWVSWIYSSGGITNYADSVKGRFTISRDNSKNTLYLQMNSLRAEDTATYYCARLVTVSS

SEQ ID NO: 1140 - protein, 125 aa, Artificial Sequence
  Made in lab
EVQLLESGGGLVQPGGSLRLSCAASGFTFSVYDMVWVRQAPGKGLEWVSSIGPSGGWTGYADSVKGRFTISRDNSKNTLYLQMNSLRAEDTAVYYCARDSGGWEALYYYYYMDVWGKGTTVTVSS

SEQ ID NO: 1141 - protein, 121 aa, Artificial Sequence
  Made in lab
EVQLLESGGGLVQPGGSLRLSCAASGFTFSVYFMDWVRQAPGKGLEWVSGIGPSGGVTSYADSVKGRFTISRDNSKNTLYLQMNSLRAEDTAVYYCAAGQLAQGHYYMDVWGKGTTVTVSS

SEQ ID NO: 1142 - protein, 119 aa, Artificial Sequence
  Made in lab
EVQLLESGGGLVQPGGSLRLSCAASGFTFSKYDMLWVRQAPGKGLEWVSYIYPSGGLTEYADSVKGRFTISRDNSKNTLYLQMNSLRAEDTAVYYCARRAPRSLSFDIWGQGTMVTVSS

SEQ ID NO: 1143 - protein, 117 aa, Artificial Sequence
  Made in lab
EVQLLESGGGLVQPGGSLRLSCAASGFTFSRYMMAWVRQAPGKGLEWVSSIYPSGGVTEYADSVKGRFTISRDNSKNTLYLQMNSLRAEDTAVYYCAREGWYGYPTWGQGTLVTVSS

SEQ ID NO: 1144 - protein, 122 aa, Artificial Sequence
  Made in lab
EVQLLESGGGLVQPGGSLRLSCAASGFTFSRYMMGWVRQAPGKGLEWVSVIVPSGGFTMYADSVKGRFTISRDNSKNTLYLQMNSLRAEDTAVYYCARSSRLWSGYYPFDYWGQGTLVTVSS

SEQ ID NO: 1145 - protein, 117 aa, Artificial Sequence
  Made in lab
EVQLLESGGGLVQPGGSLRLSCAASGFTFSRYSMTWVRQAPGKGLEWVSSIYSSGGETGYADSVKGRFTISRDNSKNTLYLQMNSLRAEDMAVYYCARERYNSFTSWGQGTMVTVSS

SEQ ID NO: 1146 - protein, 119 aa, Artificial Sequence
  Made in lab
EVQLLESGGGLVQPGGSLRLSCAASGFTFSSYVMVWVRQAPGKGLEWVSVISPSGGVTFYADSVKGRFTISRDNSKNTLYLQMNSLRAEDTAVYYCARDRRSNSLFDPWGQGTLVTVSS

SEQ ID NO: 1147 - protein, 119 aa, Artificial Sequence
  Made in lab
EVQLLESGGGLVQPGGSLRLSCAASGFTFSTYGMVWVRQAPGKGLEWVSYIWPSGGLTWYADSVKGRFTISRDNSKNTLYLQMNSLRAEDTAVYYCARSGYSYGRFDYWGQGTLVTVSS

SEQ ID NO: 1148 - protein, 123 aa, Artificial Sequence
  Made in lab
EVQLLESGGGLVQPGGSLRLSCAASGFTFSYYDMGWVRQAPGKGLEWVSWISPSGGSTLYADSVKGRFTISRDNSKNTLYLQMNSLRAEDTAVYYCASSGLYGSGSYAAFDVWGQGTMVTVSS

SEQ ID NO: 1149 - protein, 117 aa, Artificial Sequence
  Made in lab
EVQLLESGGGLVQPGGSLRLSCAASGFTFSYYHMVWVRQAPGKGLEWVSYISPSGGDTHYADSVKGRFTISRDNSKNTLYLQMNSLRAEDTAVYYCARGRYYGMDVWGQGTTVTVSS

SEQ ID NO: 1150 - protein, 129 aa, Artificial Sequence
  Made in lab
EVQLLESGGGLVQPGGSLRLSCAASGFTFSGYIMMWVRQAPGKGLEWVSGIYPSGGGTDYADSVKGRFTISRDNSKNTLYLQMNSLRAEDTAVYYCARERPGYYDSTDDDYYYYPMDVWGQGTTVTVSS

SEQ ID NO: 1151 - protein, 120 aa, Artificial Sequence
  Made in lab
EVQLLESGGGLVQPGGSLRLSCAASGFTFSVYWMEWVRQAPGKGLEWVSSISSSGGLTSYADSVKGRFTISRDNSKNTLYLQMNSLRAEDTAVYYCTTDLVSNWPWGGYWGQGTLVTVSS

SEQ ID NO: 1152 - protein, 125 aa, Artificial Sequence
  Made in lab
EVQLLESGGGLVQPGGSLRLSCAASGFTFSHYKMGWVRQAPGKGLEWVSSISSSGGDTAYADSVKGRFTISRDNSKNTLYLQMNSLRAEDTAVYYCARDRAPYYYDSSGYYSDYWGQGTLVTVSS

SEQ ID NO: 1153 - protein, 119 aa, Artificial Sequence
  Made in lab
EVQLLESGGGLVQPGGSLRLSCAASGFTFSHYAMYWVRQAPGKGLEWVSSISPSGGYTYYADSVKGRFTISRDNSKNTLYLQMNSLRAEDTAVYYCARESGTTNAFDIWGQGTMVTVSS

SEQ ID NO: 1154 - protein, 117 aa, Artificial Sequence
  Made in lab
EVQLLESGGGLVQPGGSLRLSCAASGFTFSNYHMEWVRQAPGKGLEWVSYISPSGGSTHYADSVKGRFTISRDNSKNTLYLQMNSLRAEDTAVYYCARDGWTVPRDWGQGTLVTVSS

SEQ ID NO: 1155 - protein, 118 aa, Artificial Sequence
  Made in lab
EVQLLESGGGLVQPGGSLRLSCAASGFTFSRYWMAWVRQAPGKGLEWVSSIVSSGGMTDYADSVKGRFTISRDNSKNTLYLQMNSLRAEDTAVYYCARHRGDSGLDYWGQGTLVTVSS

SEQ ID NO: 1156 - protein, 117 aa, Artificial Sequence
  Made in lab
EVQLLESGGGLVQPGGSLRLSCAASGFTFSHYPMLWVRQAPGKGLEWVSGISSSGGWTDYADSVKGRFTISRDNSKNTLYLQMNSLRAEDTAVYYCARDRALGMDVWGQGTTVTVSS

SEQ ID NO: 1157 - protein, 115 aa, Artificial Sequence
  Made in lab
EVQLLESGGGLVQPGGSLRLSCAASGFTFSLYSMVWVRQAPGKGLEWVSRIRPSGGQTMYADSVKGRFTISRDNSKNTLYLQMNSLRAEDTAVYYCATGYAFDIWGQGTMVTVSS

SEQ ID NO: 1158 - protein, 125 aa, Artificial Sequence
  Made in lab
EVQLLESGGGLVQPGGSLRLSCAASGFTFSFYDMLWVRQAPGKGLEWVSSIWSSGGQTGYADSVKGRFTISRDNSKNTLYLQMNSLRAEDTAMYYCAREKASDLSGSYSEALDYWGQGTLVTVSS

SEQ ID NO: 1159 - protein, 125 aa, Artificial Sequence
  Made in lab
EVQLLESGGGLVQPGGSLRLSCAASGFTFSNYHMNWVRQAPGKGLEWVSYIYPSGGVTYYADSVKGRFTISRDNSKNTLYLQMNSLRAEDTAVYYCTTGIAAAGNYYYYYGMDVWGQGTTVTVSS

SEQ ID NO: 1160 - protein, 124 aa, Artificial Sequence
  Made in lab
EVQLLESGGGLVQPGGSLRLSCAASGFTFSKYGMVWVRQAPGKGLEWVSSISSSGGNTAYADSVKGRFTISRDNSKNTLYLQMNSLRAEDTAVYYCARGELERRRRNYYGMDVWGQGTTVTVSS

SEQ ID NO: 1161 - protein, 119 aa, Artificial Sequence
  Made in lab
EVQLLESGGGLVQPGGSLRLSCAASGFTFSNYAMTWVRQAPGKGLEWVSSIYSSGGDTAYADYVKGRFTISRDNSKNTLYLQMNSLRAEDTAVYYCAREYYTGWNFDYWGQGTLVTVSS

SEQ ID NO: 1162 - protein, 122 aa, Artificial Sequence
  Made in lab
EVQLLESGGGLVQPGGSLRLSCAASGFTFSQYDMVWVRQAPGKGLEWVSYIYSSGGHTLYVDSVKGRFTISRDNSKNTLYLQMNSLRAEDTATYYCARIRSSGYYHEVLDYWGQGTLVTVSS

SEQ ID NO: 1163 - protein, 123 aa, Artificial Sequence
  Made in lab
EVQLLESGGGLVQPGGSLRLSCAASGFTFSTYMMYWVRQAPGKGLEWVSVIGPSGGATGYADSVKGRFTISRDNSKNTLYLQMNSLRAEDTAVYYCARIRKAFGYGSGSLDYWGQGTLVTVSS

SEQ ID NO: 1164 - protein, 126 aa, Artificial Sequence
  Made in lab
EVQLLESGGGLVQPGGSLRLSCAASGFTFSYYDMQWVRQAPGKGLEWVSYIGPSGGDTDYADSVKGRFTISRDNSKNTLYLQMNSLRAEDTAVYYCASSSYYYDSSGYYHEAFDIWGQGTMVTVSS

SEQ ID NO: 1165 - protein, 127 aa, Artificial Sequence
  Made in lab
EVQLLESGGGLVQPGGSLRLSCAASGFTFSYYMMRWVRQAPGKGLEWVSYIGPSGGATTYADSVKGRFTISRDNSKNTLYLQMNSLRAEDTAVYYCARGRSVKYYYDSSGYLLFDYWGQGTLVTVSS

SEQ ID NO: 1166 - protein, 122 aa, Artificial Sequence
  Made in lab
EVQLLESGGGLVQPGGSLRLSCAASGFTFSHYSMYWVRQAPGKGLEWVSGIYSSGGPTIYADSVKGRFTISRDNSKNTLYLQMNSLRAEDTAVYYCARLQIEMATIGHFDYWGQGTLVTVSS

SEQ ID NO: 1167 - protein, 122 aa, Artificial Sequence; identical to SEQ ID NO: 1162
  Made in lab

SEQ ID NO: 1168 - protein, 118 aa, Artificial Sequence
  Made in lab
EVQLLESGGGLVQPGGSLRLSCAASGFTFSHYWMMWVRQAPGKGLEWVSSIVPSGGDTYYADSVKGRFTISRDNSKNTLYLQMNSLRAEDTAVYYCTTDPVMTPVDYWGQGTLVTVSS

SEQ ID NO: 1169 - protein, 123 aa, Artificial Sequence
  Made in lab
EVQLLESGGGLVQPGGSLRLSCAASGFTFSPYFMNWVRQAPGKGLEWVSSIYPSGGITKYADSVKGRFTISRDNSKNTLYLQMNSLRAEDTATYYCAKETYYYGSGSYAFDIWGQGTMVTVSS

SEQ ID NO: 1170 - protein, 117 aa, Artificial Sequence
  Made in lab
EVQLLESGGGLVQPGGSLRLSCAASGFTFSQYYMYWVRQAPGKGLEWVSRISPSGGMTSYADSVKGRFTISRDNSKNTLYLQMNSLRAEDTAMYYCARHKYGGPDFWGQGTLVTVSS

SEQ ID NO: 1171 - protein, 115 aa, Artificial Sequence
  Made in lab
EVQLLESGGGLVQPGGSLRLSCAASGFTFSRYQMNWVRQAPGKGLEWVSSIRSSGGVTKYADSVKGRFTISRDNSKNTLYLQMNSLRAEDTAMYYCARGRGLSSWGQGTLVTVSS

SEQ ID NO: 1172 - protein, 113 aa, Artificial Sequence
  Made in lab
EVQLLESGGGLVQPGGSLRLSCAASGFTFSLYTMAWVRQAPGKGLEWVSYISPSGGFTGYADSVKGRFTISRDNSKNTLYLQMNSLRAEDTAVYYCATWGDPWGQGTLVTVSS

SEQ ID NO: 1173 - protein, 126 aa, Artificial Sequence
  Made in lab
EVQLLESGGGLVQPGGSLRLSCAASGFTFSDYFMGWVRQAPGKGLEWVSRISSSGGHTMYADSVKGRFTISRDNSKNTLYLQMNSLRAEDTAVYYCAREEDYYDSSGYYPPAFDIWGQGTTVTVSS

SEQ ID NO: 1174 - protein, 116 aa, Artificial Sequence
  Made in lab
EVQLLESGGGLVQPGGSLRLSCAASGFTFSIYWMYWVRQAPGKGLEWVSGIGPSGGYTSYADSVKGRFTISRDNSKNTLYLQMNSLRAEDTAVYYCARGNGGFDSWGQGTLVTVSS

SEQ ID NO: 1175 - protein, 124 aa, Artificial Sequence
  Made in lab
EVQLLESGGGLVQPGGSLRLSCAASGFTFSPYHMSWVRQAPGKGLEWVSSIYPSGGFTAYADSVKGRFTISRDNSKNTLYLQMNSLRAEDTAVYYCARESAYYYDSSPPAFDIWGQGTMVTVSS

SEQ ID NO: 1176 - protein, 117 aa, Artificial Sequence
  Made in lab
EVQLLESGGGLVQPGGSLRLSCAASGFTFSTYAMYWVRQAPGKGLEWVSSIYSSGGATWYADSVKGRFTISRDNSKNTLYLQMNSLRAEDTAVYYCARSTFDYFDYWGQGTLVTVSS

SEQ ID NO: 1177 - protein, 121 aa, Artificial Sequence
  Made in lab
EVQLLESGGGLVQPGGSLRLSCAASGFTFSKYRMMWVRQAPGKGLEWVSYISSSGGATIYADSVKGRFTISRDNSKNTLYLQMNSLRAEDTAVYYCARHGPQIAAWYFDLWGRGTLVTVSS

SEQ ID NO: 1178 - protein, 128 aa, Artificial Sequence
  Made in lab
EVQLLESGGGLVQPGGSLRLSCAASGFTFSPYSMDWVRQAPGKGLEWVSGISSSGGRTVYADSVKGRFTISRDNSKNTLYLQMNSLRAEDTATYYCARGPYYDFWSGYYIDRGPLDYWGQGTLVTVSS

SEQ ID NO: 1179 - protein, 120 aa, Artificial Sequence
  Made in lab
EVQLLESGGGLVQPGGSLRLSCAASGFTFSWYMMAWVRQAPGKGLEWVSWISSSGGFTPYADSVKGRFTISRDNSKNTLYLQMNSLRAEDTAVYYCARGQQWPGVAFDIWGQGTMVTVSS

SEQ ID NO: 1180 - protein, 117 aa, Artificial Sequence
  Made in lab
EVQLLESGGGLVQPGGSLRLSCAASGFTFSFYPMMWVRQAPGKGLEWVSYIGPSGGNNADSVKGRFTISRDNSKNTLYLQMNSLRAEDTATYYCARGLWFGGRLDYWGQGTLVTVSS

SEQ ID NO: 1181 - protein, 127 aa, Artificial Sequence
  Made in lab
EVQLLESGGGLVQPGGSLRLSCAASGFTFSHYWMKWVRQAPGKGLEWVSGISSSGGQTDYADSVKGRFTISRDNSKNTLYLQMNSLRAEDTAVYYCARSPRLRFLEWPRNYYGMDVWGQGTTVTVSS

SEQ ID NO: 1182 - protein, 116 aa, Artificial Sequence
  Made in lab
EVQLLESGGGLVQPGGSLRLSCAASGFTFSLYMMVWVRQAPGKGLEWVSYIGPSGGAYADSVKGRFTISRDNSKNTLYLQMNSLRAEDTAVYYCARSVRGLTFDYWGQGTLVTVSS

SEQ ID NO: 1183 - protein, 123 aa, Artificial Sequence
  Made in lab
EVQLLESGGGLVQPGGSLRLSCAASGFTFSPYEMGWVRQAPGKGLEWVSRISPSGGMTLYADSVKGRFTISRDNSKNTLYLQMNSLRAEDTAVYYCARMGRGGWWAFDAFDIWGQGTMVTVSS

SEQ ID NO: 1184 - protein, 123 aa, Artificial Sequence
  Made in lab
EVQLLESGGGLVQPGGSLRLSCAASGFTFSWYKMVWVRQAPGKGLEWVSGIYPSGGTTHYADSVKGRFTISRDNSKNTLYLQMNSLRAEDTAVYYCAKGGGDFWSGYYPFDYWGQGTLVTVSS

SEQ ID NO: 1185 - protein, 23 aa, Artificial Sequence
  Made in lab
  misc_feature (23)..(23): Xaa can be any naturally occurring amino acid
MDFQVQIFSFLLISASVIMSRGX

SEQ ID NO: 1186 - protein, 20 aa, Artificial Sequence
  Made in lab
MEAPAQLLFLLLLWLPDTTG

SEQ ID NO: 1187 - protein, 15 aa, Artificial Sequence
  Made in a lab
RASESVHNFGISFMN

SEQ ID NO: 1188 - protein, 7 aa, Artificial Sequence
  Made in a lab
TASNQGS

SEQ ID NO: 1189 - protein, 9 aa, Artificial Sequence
  Made in a lab
HQGKEVPWT

SEQ ID NO: 1190 - protein, 15 aa, Artificial Sequence
  Made in a lab
RASESVGNFGISFVN

SEQ ID NO: 1191 - protein, 7 aa, Artificial Sequence
  Made in a lab
AASNQGS

SEQ ID NO: 1192 - protein, 9 aa, Artificial Sequence
  Made in a lab
QQSKEVPYT

SEQ ID NO: 1193 - protein, 6 aa, Artificial Sequence
  Made in a lab
NTYAMN

SEQ ID NO: 1194 - protein, 19 aa, Artificial Sequence
  Made in a lab
RTVTKSNKYATYYADSVSD

SEQ ID NO: 1195 - protein, 9 aa, Artificial Sequence
  Made in a lab
EDYYGTLDY

SEQ ID NO: 1196 - protein, 5 aa, Artificial Sequence
  Made in a lab
SYWMH

SEQ ID NO: 1197 - protein, 17 aa, Artificial Sequence
  Made in a lab
EINPSNGRTNYNERFKS

SEQ ID NO: 1198 - protein, 9 aa, Artificial Sequence
  Made in a lab
SDTKATCDY

SEQ ID NO: 1199 - protein, 111 aa, Artificial Sequence
  Made in a lab
EIVLTQSPPSLAVSLGQRATISCRASESVHNFGISFMNWFQQKSGQPPKLLIYTASNQGSGVPARFSGRGSGTDFSLIIHPVEEDDTAMYFCHQGKEVPWTFGGGTKLEIK

SEQ ID NO: 1200 - protein, 111 aa, Artificial Sequence
  Made in a lab
DIVLTQSPASLAVSLGQRATISCRASESVGNFGISFVNWFQQKPGQPPKLLIYAASNQGSGVPARFSGSGSGTDFSLNIHPMEEDDTAMYFCQQSKEVPYTFGGGTKLEIK

SEQ ID NO: 1201 - protein, 111 aa, Artificial Sequence
  Made in a lab
EIVLTQSPATLSLSPGERATLSCRASESVHNFGISFMNWYQQKPGQAPRLLIYTASNQGSGIPARFSGSGSGTDFTLTISSLEPEDFAVYYCHQGKEVPWTFGQGTKVEIK

SEQ ID NO: 1202 - protein, 111 aa, Artificial Sequence
  Made in a lab
DIVLTQSPASLAVSPGQRATITCRASESVHNFGISFMNWYQQKPGQPPKLLIYTASNQGSGVPARFSGSGSGTDFTLTINPVEANDTANYYCHQGKEVPWTFGQGTKVEIK

SEQ ID NO: 1203 - protein, 111 aa, Artificial Sequence
  Made in a lab
EIVLTQSPATLSLSPGERATLSCRASESVGNFGISFVNWYQQKPGQAPRLLIYAASNQGSGIPARFSGSGSGTDFTLTISSLEPEDFAVYYCQQSKEVPYTFGQGTKLEIK

SEQ ID NO: 1204 - protein, 111 aa, Artificial Sequence
  Made in a lab
DIQMTQSPSSLSASVGDRVTITCRASESVGNFGISFVNWYQQKPGKAPKLLIYAASNQGSGVPSRFSGSGSGTDFTLTISSLQPEDFATYYCQQSKEVPYTFGQGTKLEIK

SEQ ID NO: 1205 - protein, 120 aa, Artificial Sequence
  Made in a lab
EVQLVESGGGLVQPKGTLRLSCAASGFSFNTYAMNWVRQAPGKSLEWVARTVTKSNKYATYYADSVSDRVTISREDSQSMLYLQMTNLKTEDTAMYYCVREDYYGTLDYWGQGTSVTVSS

SEQ ID NO: 1206 - protein, 118 aa, Artificial Sequence
  Made in a lab
QVQLQQPGAELVKPGASVKLSCKASGYIFTSYWMHWVKQRPGQGLEWIGEINPSNGRTNYNERFKSKATLTVDKSSSTAYIQLSSLTSDDSAVYYCSRSDTKATCDYWGQGTTLTVSS

SEQ ID NO: 1207 - protein, 120 aa, Artificial Sequence
  Made in a lab
EVQLVESGGGLVQPGGSLRLSCAASGFTFNTYAMNWVRQAPGKGLEWVGRTVTKSNKYATYYADSVSDRFTISRDDSKNSLYLQMNSLKTEDTAVYYCAREDYYGTLDYWGQGTLVTVSS

SEQ ID NO: 1208 - protein, 120 aa, Artificial Sequence; identical to SEQ ID NO: 1207
  Made in a lab

SEQ ID NO: 1209 - protein, 118 aa, Artificial Sequence
  Made in a lab
QVQLVQSGAEVKKPGASVKVSCKASGYIFTSYWMHWVRQAPGQGLEWMGEINPSNGRTNYNERFKSRVTMTRDTSISTAYMELSRLRSDDTAVYYCARSDTKATCDYWGQGTTVTVSS

SEQ ID NO: 1210 - protein, 118 aa, Artificial Sequence; identical to SEQ ID NO: 1209
  Made in a lab

SEQ ID NO: 1211 - DNA, 333 bp, Artificial Sequence
  Made in a lab
gagattgtgctgacccaatctccaccttctttggctgtgtctctggggcagagggccaccatctcctgcagagccagcgaaagtgttcataattttggcattagttttatgaactggtttcaacagaaatcaggacagccacccaaactcctcatctatactgcatccaaccaaggatccggggtccctgccaggtttagtggcagagggtctgggacagacttcagtctcatcatccaccctgtggaggaagatgatactgcaatgtatttctgtcaccaaggtaaggaggttccgtggacgttcggtggaggcaccaagctagaaatcaaa

SEQ ID NO: 1212 - DNA, 333 bp, Artificial Sequence
  Made in a lab
gacattgtgctgacccaatctccagcttctttggctgtgtctctagggcagagggccaccatctcctgcagagccagcgaaagtgttggtaattttggcattagttttgtgaactggttccaacagaaaccaggacagccacccaaactcctcatctatgctgcctccaaccaaggatccggggtccctgccaggtttagtggcagtgggtctgggacagacttcagcctcaacatccatcctatggaggaggatgatactgcaatgtatttctgtcagcaaagtaaggaggttccgtacacgttcggaggggggaccaagctggaaataaaa

SEQ ID NO: 1213 - DNA, 333 bp, Artificial Sequence
  Made in a lab
gaaattgtgttgacacagtctccagccaccctgtctttgtctccaggggaaagagccaccctctcctgcagagccagcgaaagtgttcataattttggcattagttttatgaactggtaccaacagaaacctggccaggctcccaggctcctcatctatactgcatccaaccaaggatccggcatcccagccaggttcagtggcagtgggtctgggacagacttcactctcaccatcagcagcctagagcctgaagattttgcagtttattactgtcaccaaggtaaggaggttccgtggacgttcggccaagggaccaaggtggaaatcaaa

SEQ ID NO: 1214 - DNA, 333 bp, Artificial Sequence
  Made in a lab
gacattgtgctgacccagtctccagcctccttggccgtgtctccaggacagagggccaccatcacctgcagagccagcgaaagtgttcataattttggcattagttttatgaactggtatcagcagaaaccaggacaacctcctaaactcctgatttacactgcatccaaccaaggatccggggtcccagccaggttcagcggcagtgggtctgggaccgatttcaccctcacaattaatcctgtggaagctaatgatactgcaaattattactgtcaccaaggtaaggaggttccgtggacgttcggccaagggaccaaggtggaaatcaaa

SEQ ID NO: 1215 - DNA, 333 bp, Artificial Sequence
  Made in a lab
gaaattgtgttgacacagtctccagccaccctgtctttgtctccaggggaaagagccaccctctcctgcagagccagcgaaagtgttggtaattttggcattagttttgtgaactggtaccaacagaaacctggccaggctcccaggctcctcatctatgctgcctccaaccaaggatccggcatcccagccaggttcagtggcagtgggtctgggacagacttcactctcaccatcagcagcctagagcctgaagattttgcagtttattactgtcagcaaagtaaggaggttccgtacacttttggccaggggaccaagctggagatcaag

SEQ ID NO: 1216 - DNA, 334 bp, Artificial Sequence
  Made in a lab
gacatccagatgacccagtctccatcctccctgtctgcatctgtaggagacagagtcaccatcacttgcagagccagcgaaagtgttggtaattttggcattagttttgtgaactggtatcagcagaaaccagggaaagcccctaagctcctgatctatgctgcctccaaccaaggatccggggtcccatcaaggttcagtggcagtggatctgggacagatttcactctcaccatcagcagtctgcaacctgaagattttgcaacttactactgtcagcaaagtaaggaggttccgtacacttttggccaggggaccaagctggagatcaagt

SEQ ID NO: 1217 - DNA, 360 bp, Artificial Sequence
  Made in a lab
gaggtgcagcttgttgagtctggtggaggattggtacagcctaaagggacattgagactctcatgtgccgcctctggattcagcttcaatacctatgccatgaactgggtccgccaggctccaggaaagagtttggagtgggttgctcgcacagtgactaaaagtaataagtatgcaacatattatgcagattcagtgagtgacagagtcaccatctccagagaggattcacaaagcatgctttatctgcaaatgaccaacttgaaaactgaggacacagccatgtattactgtgtgagagaagattactacggcactctggactactggggtcaaggaacctcagtcaccgtctcctca

SEQ ID NO: 1218 - DNA, 354 bp, Artificial Sequence
  Made in a lab
caggtccaactgcagcagcctggggctgaactggtgaagcctggggcttctgtgaagctgtcctgcaaggcttctggctacatcttcaccagctactggatgcactgggtgaagcagaggcctggacaaggccttgagtggattggagagattaatcctagcaacggtcgtactaactacaatgagaggttcaagagcaaggccacactgactgtagacaaatcctccagcacagcctacattcaactcagcagcctgacatctgatgactctgcggtctattactgttcaagatcggatactaaggctacgtgtgactactggggccaaggcaccactctcacagtctcctca

SEQ ID NO: 1219 - DNA, 360 bp, Artificial Sequence
  Made in a lab
gaggtgcagctggtggagtctgggggaggcttggtccagcctggagggtccctgagactctcctgtgcagcctctggattcaccttcaatacctatgccatgaactgggtccgccaggctccagggaaggggctggagtgggttggccgcacagtgactaaaagtaataagtatgcaacatattatgcagattcagtgagtgacagattcaccatctcaagagatgattcaaagaactcactgtatctgcaaatgaacagcctgaaaaccgaggacacggccgtgtattactgtgctagagaagattactacggcactctggactactggggccaaggaaccctggtcaccgtctcctca

SEQ ID NO: 1220 - DNA, 360 bp, Artificial Sequence; identical to SEQ ID NO: 1219
  Made in a lab

SEQ ID NO: 1221 - DNA, 354 bp, Artificial Sequence
  Made in a lab
caggtgcagctggtgcagtctggggctgaggtgaagaagcctggggcctcagtgaaggtctcctgcaaggcttctggctacatcttcaccagctactggatgcactgggtgcgacaggcccctggacaagggcttgagtggatgggagagattaatcctagcaacggtcgtactaactacaatgagaggttcaagagcagggtcaccatgaccagggacacgtccatcagcacagcctacatggagctgagcaggctgagatctgacgacacggccgtgtattactgtgcgagatcggatactaaggctacgtgtgactactggggccaagggaccacggtcaccgtctcctct

SEQ ID NO: 1222 - DNA, 354 bp, Artificial Sequence; identical to SEQ ID NO: 1221
  Made in a lab

SEQ ID NO: 1223 - protein, 21 aa, Artificial Sequence
  Made in a lab
QRHNNSSLNTGTQMAGHSPNS

SEQ ID NO: 1224 - protein, 21 aa, Artificial Sequence
  Made in a lab
QRHNNSSLNTGTQKARHSPNS

SEQ ID NO: 1225 - protein, 21 aa, Artificial Sequence
  Made in a lab
QRHNNSSLNTGTQMARHSPNS

SEQ ID NO: 1226 - protein, 21 aa, Artificial Sequence
  Made in a lab
QRHNNSSLNTRTQKAGHSPNS

SEQ ID NO: 1227 - protein, 21 aa, Artificial Sequence
  Made in a lab
QRHNNSSLNTRTQMAGHSPNS

SEQ ID NO: 1228 - protein, 21 aa, Artificial Sequence
  Made in a lab
QRHNNSSLNTRTQMARHSPNS

SEQ ID NO: 1229 - protein, 22 aa, Artificial Sequence
  Made in lab
MDFQVQIFSFLLISASVIMSRG

SEQ ID NO: 1230 - protein, 723 aa, Artificial Sequence [sequence omitted]

SEQ ID NO: 1231 - DNA, 2235 bp, Artificial Sequence
  Made in a lab
atggattttcaagtgcagattttcagcttcctgctaatcagtgcttcagtcataatgtcgcgaggattgcccgcccaggtggcatttacaccctacgccccggagcccgggagcacatgccggctcagagaatactatgaccagacagctcagatgtgctgcagcaaatgctcgccgggccaacatgcaaaagtcttctgtaccaagacctcggacaccgtgtgtgactcctgtgaggacagcacatacacccagctctggaactgggttcccgagtgcttgagctgtggctcccgctgtagctctgaccaggtggaaactcaagcctgcactcgggaacagaaccgcatctgcacctgcaggcccggctggtactgcgcgctgagcaagcaggaggggtgccggctgtgcgcgccgctgcgcaagtgccgcccgggcttcggcgtggccagaccaggaactgaaacatcagacgtggtgtgcaagccctgtgccccggggacgttctccaacacgacttcatccacggatatttgcaggccccaccagatctgtaacgtggtggccatccctgggaatgcaagcatggatgcagtctgcacgtccacgtcccccacccggagtatggccccaggggcagtacacttaccccagccagtgtccacacgatcccaacacacgcagccaactccagaacccagcactgctccaagcacctccttcctgctcccaatgggccccagccccccagctgaagggagcactggcgacaccggtgagcccaaatcttctgacaaaactcacacatgcccaccgtgcccagcacctgaagccgcgggtgcaccgtcagtcttcctcttccccccaaaacccaaggacaccctcatgatctcccggacccctgaggtcacatgcgtggtggtggacgtgagccacgaagaccctgaggtcaagttcaactggtacgtggacggcgtggaggtgcataatgccaagacaaagccgcgggaggagcagtacaacagcacgtaccgtgtggtcagcgtcctcaccgtcctgcaccaggactggctgaatggcaaggcgtacgcgtgcgcggtctccaacaaagccctcccagcccccatcgagaaaaccatctccaaagccaaagggcagccccgagaaccacaggtgtacaccctgcccccatcccgggatgagctgaccaagaaccaggtcagcctgacctgcctggtcaaaggcttctatccaagcgacatcgccgtggagtgggagagcaatgggcagccggagaacaactacaagaccacgcctcccgtgctggactccgacggctccttcttcctctacagcaagctcaccgtggacaagagcaggtggcagcaggggaacgtcttctcatgctccgtgatgcatgaggctctgcacaaccactacacgcagaagagcctctccctgtctccgggtcagaggcacaacaattcttccctgaatacaggaactcagatggcaggtcattctccgaattctgctccgtggcagtgcgcgccctgctccgccgagaagctcgcgctctgcccgccggtgtccgcctcgtgctcggaggtcacccggtccgccggctgcggctgttgcccgatgtgcgccctgcctctgggcgccgcgtgcggcgtggcgactgcacgctgcgcccggggactcagttgccgcgcgctgccgggggagcagcaacctctgcacgccctcacccgcggccaaggcgcctgcgtgcaggagtctgacgcctccgctccccatgctgcagaggcagggagccctgaaagcccagagagcacggagataactgaggaggagctcctggataatttccatctgatggccccttctgaagaggatcattccatcctttgggacgccatcagtacctatgatggctcgaaggctctccatgtcaccaacatcaaaaaatggaaggagccctgccgaatagaactctacagagtcgtagagagtttagccaaggcacaggagacatcaggagaagaaatttccaaattttacctgccaaactgcaacaagaatggattttatcacagcagacagtgtgagacatccatggatggagaggcgggactctgctggtgcgtctacccttggaatgggaagaggatccctgggtctccagagatcaggggagaccccaactgccagatatattttaatgtacaaaac

SEQ ID NO: 1232 - protein, 1156 aa, Artificial Sequence [sequence omitted]

SEQ ID NO: 1233 - protein, 961 aa, Artificial Sequence
  Made in a lab
MEAPAQLLFLLLLWLPDTTGEICGPGIDIRNDYQQLKRLENCTVIEGYLHILLISKAEDYRSYRFPKLTVITEYLLLFRVAGLESLGDLFPNLTVIRGWKLFYNYALVIFEMTNLKDIGLYNLRNITRGAIRIEKNADLCYLSTVDWSLILDAVSNNYIVGNKPPKECGDLCPGTMEEKPMCEKTTINNEYNYRCWTTNRCQKMCPSTCGKRACTENNECCHPECLGSCSAPDNDTACVACRHYYYAGVCVPACPPNTYRFEGWRCVDRDFCANILSAESSDSEGFVIHDGECMQECPSGFIRNGSQSMYCIPCEGPCPKVCEEEKKTKTIDSVTSAQMLQGCTIFKGNLLINIRRGNNIASELENFMGLIEVVTGYVKIRHSHALVSLSFLKNLRLILGEEQLEGNYSFYVLDNQNLQQLWDWDHRNLTIKAGKMYFAFNPKLCVSEIYRMEEVTGTKGRQSKGDINTRNNGERASCESDVLHFTSTTTSKNRIIITWHRYRPPDYRDLISFTVYYKEAPFKNVTEYDGQDACGSNSWNMVDVDLPPNKDVEPGILLHGLKPWTQYAVYVKAVTLTMVENDHIRGAKSEILYIRTNASVPSIPLDVLSASNSSSQLIVKWNPPSLPNGNLSYYIVRWQRQPQDGYLYRHNYCSKDKIPIRKYADGTIDIEEVTENPKTEVCGGEKGPCCACPKTEAEKQAEKEEAEYRKVFENFLHNSIFVPRPESDQEPKSCDKTHTSPPCSAPELLGGPSVFLFPPKPKDTLMISRTPEVTCVVVDVSHEDPEVKFNWYVDGVEVHNAKTKPREEQYNSTYRVVSVLTVLHQDWLNGKEYKCKVSNKALPAPIEKTISKAKGQPREPQVYTLPPSRDELTKNQVSLTCLVKGFYPSDIAVEWESNGQPENNYKTTPPVLDSDGSFFLYSKLTVDKSRWQQGNVFSCSVMHEALHNHYTQKSLSLSPGK

SEQ ID NO: 1234 - DNA, 3468 bp, Artificial Sequence
  Made in a lab
atggaagcaccagcgcagcttctcttcctcctgctactctggctcccagataccaccggtgaaatctgcgggccaggcatcgacatccgcaacgactatcagcagctgaagcgcctggagaactgcacggtgatcgagggctacctccacatcctgctcatctccaaggccgaggactaccgcagctaccgcttccccaagctcacggtcattaccgagtacttgctgctgttccgagtggctggcctcgagagcctcggagacctcttccccaacctcacggtcatccgcggctggaaactcttctacaactacgccctggtcatcttcgagatgaccaatctcaaggatattgggctttacaacctgaggaacattactcggggggccatcaggattgagaaaaatgctgacctctgttacctctccactgtggactggtccctgatcctggatgcggtgtccaataactacattgtggggaataagcccccaaaggaatgtggggacctgtgtccagggaccatggaggagaagccgatgtgtgagaagaccaccatcaacaatgagtacaactaccgctgctggaccacaaaccgctgccagaaaatgtgcccaagcacgtgtgggaagcgggcgtgcaccgagaacaatgagtgctgccaccccgagtgcctgggcagctgcagcgcgcctgacaacgacacggcctgtgtagcttgccgccactactactatgccggtgtctgtgtgcctgcctgcccgcccaacacctacaggtttgagggctggcgctgtgtggaccgtgacttctgcgccaacatcctcagcgccgagagcagcgactccgaggggtttgtgatccacgacggcgagtgcatgcaggagtgcccctcgggcttcatccgcaacggcagccagagcatgtactgcatcccttgtgaaggtccttgcccgaaggtctgtgaggaagaaaagaaaacaaagaccattgattctgttacttctgctcagatgctccaaggatgcaccatcttcaagggcaatttgctcattaacatccgacgggggaataacattgcttcagagctggagaacttcatggggctcatcgaggtggtgacgggctacgtgaagatccgccattctcatgccttggtctccttgtccttcctaaaaaaccttcgcctcatcctaggagaggagcagctagaagggaattactccttctacgtcctcgacaaccagaacttgcagcaactgtgggactgggaccaccgcaacctgaccatcaaagcagggaaaatgtactttgctttcaatcccaaattatgtgtttccgaaatttaccgcatggaggaagtgacggggactaaagggcgccaaagcaaaggggacataaacaccaggaacaacggggagagagcctcctgtgaaagtgacgtcctgcatttcacctccaccaccacgtcgaagaatcgcatcatcataacctggcaccggtaccggccccctgactacagggatctcatcagcttcaccgtttactacaaggaagcaccctttaagaatgtcacagagtatgatgggcaggatgcctgcggctccaacagctggaacatggtggacgtggacctcccgcccaacaaggacgtggagcccggcatcttactacatgggctgaagccctggactcagtacgccgtttacgtcaaggctgtgaccctcaccatggtggagaacgaccatatccgtggggccaagagtgagatcttgtacattcgcaccaatgcttcagttccttccattcccttggacgttctttcagcatcgaactcctcttctcagttaatcgtgaagtggaaccctccctctctgcccaacggcaacctgagttactacattgtgcgctggcagcggcagcctcaggacggctacctttaccggcacaattactgctccaaagacaaaatccccatcaggaagtatgccgacggcaccatcgacattgaggaggtcacagagaaccccaagactgaggtgtgtggtggggagaaagggccttgctgcgcctgccccaaaactgaagccgagaagcaggccgagaaggaggaggctgaataccgcaaagtctttgagaatttcctgcacaactccatcttcgtgcccagacctgaaaggaagcggagagatgtcatgcaagtggccaacaccaccatgtccagccgaagcaggaacaccacggccgcagacacctacaacatcaccgacccggaagagctggagacagagtaccctttctttgagagcagagtggataacaaggagagaactgtcatttctaaccttcggcctttcacattgtaccgcatcgatatccacagctgcaaccacgaggctgagaagctgggctgcagcgcctccaacttcgtctttgcaaggactatgcccgcagaaggagcagatgacattcctgggccagtgacctgggagccaaggcctgaaaactccatctttttaaagtggccggaacctgagaatcccaatggattgattctaatgtatgaaataaaatacggatcacaagttgaggatcagcgagaatgtgtgtccagacaggaatacaggaagtatggaggggccaagctaaaccggctaaacccggggaactacacagcccggattcaggccacatctctctctgggaatgggtcgtggacagatcctgtgttcttctatgtccaggccaaaacaggatatgaaaactcgagcgagcccaaatcttctgacaaaactcacacatctccaccgtcctcagcacctgaactcctgggtggaccgtcagtcttcctcttccccccaaaacccaaggacaccctcatgatctcccggacccctgaggtcacatgcgtggtggtggacgtgagccacgaagaccctgaggtcaagttcaactggtacgtggacggcgtggaggtgcataatgccaagacaaagccgcgggaggagcagtacaacagcacgtaccgtgtggtcagcgtcctcaccgtcctgcaccaggactggctgaatggcaaggagtacaagtgcaaggtctccaacaaagccctcccagcccccatcgagaaaaccatctccaaagccaaagggcagccccgagaaccacaggtgtacaccctgcccccatcccgggatgagctgaccaagaaccaggtcagcctgacctgcctggtcaaaggcttctatccaagcgacatcgccgtggagtgggagagcaatgggcagccggagaacaactacaagaccacgcctcccgtgctggactccgacggctccttcttcctctacagcaagctcaccgtggacaagagcaggtggcagcaggggaacgtcttctcatgctccgtgatgcatgaggctctgcacaaccactacacgcagaagagcctctccctgtctccgggtaaa

SEQ ID NO: 1235 - DNA, 2883 bp, Artificial Sequence
  Made in a lab
atggaagcaccagcgcagcttctcttcctcctgctactctggctcccagataccaccggtgaaatctgcgggccaggcatcgacatccgcaacgactatcagcagctgaagcgcctggagaactgcacggtgatcgagggctacctccacatcctgctcatctccaaggccgaggactaccgcagctaccgcttccccaagctcacggtcattaccgagtacttgctgctgttccgagtggctggcctcgagagcctcggagacctcttccccaacctcacggtcatccgcggctggaaactcttctacaactacgccctggtcatcttcgagatgaccaatctcaaggatattgggctttacaacctgaggaacattactcggggggccatcaggattgagaaaaatgctgacctctgttacctctccactgtggactggtccctgatcctggatgcggtgtccaataactacattgtggggaataagcccccaaaggaatgtggggacctgtgtccagggaccatggaggagaagccgatgtgtgagaagaccaccatcaacaatgagtacaactaccgctgctggaccacaaaccgctgccagaaaatgtgcccaagcacgtgtgggaagcgggcgtgcaccgagaacaatgagtgctgccaccccgagtgcctgggcagctgcagcgcgcctgacaacgacacggcctgtgtagcttgccgccactactactatgccggtgtctgtgtgcctgcctgcccgcccaacacctacaggtttgagggctggcgctgtgtggaccgtgacttctgcgccaacatcctcagcgccgagagcagcgactccgaggggtttgtgatccacgacggcgagtgcatgcaggagtgcccctcgggcttcatccgcaacggcagccagagcatgtactgcatcccttgtgaaggtccttgcccgaaggtctgtgaggaagaaaagaaaacaaagaccattgattctgttacttctgctcagatgctccaaggatgcaccatcttcaagggcaatttgctcattaacatccgacgggggaataacattgcttcagagctggagaacttcatggggctcatcgaggtggtgacgggctacgtgaagatccgccattctcatgccttggtctccttgtccttcctaaaaaaccttcgcctcatcctaggagaggagcagctagaagggaattactccttctacgtcctcgacaaccagaacttgcagcaactgtgggactgggaccaccgcaacctgaccatcaaagcagggaaaatgtactttgctttcaatcccaaattatgtgtttccgaaatttaccgcatggaggaagtgacggggactaaagggcgccaaagcaaaggggacataaacaccaggaacaacggggagagagcctcctgtgaaagtgacgtcctgcatttcacctccaccaccacgtcgaagaatcgcatcatcataacctggcaccggtaccggccccctgactacagggatctcatcagcttcaccgtttactacaaggaagcaccctttaagaatgtcacagagtatgatgggcaggatgcctgcggctccaacagctggaacatggtggacgtggacctcccgcccaacaaggacgtggagcccggcatcttactacatgggctgaagccctggactcagtacgccgtttacgtcaaggctgtgaccctcaccatggtggagaacgaccatatccgtggggccaagagtgagatcttgtacattcgcaccaatgcttcagttccttccattcccttggacgttctttcagcatcgaactcctcttctcagttaatcgtgaagtggaaccctccctctctgcccaacggcaacctgagttactacattgtgcgctggcagcggcagcctcaggacggctacctttaccggcacaattactgctccaaagacaaaatccccatcaggaagtatgccgacggcaccatcgacattgaggaggtcacagagaaccccaagactgaggtgtgtggtggggagaaagggccttgctgcgcctgccccaaaactgaagccgagaagcaggccgagaaggaggaggctgaataccgcaaagtctttgagaatttcctgcacaactccatcttcgtgcccagacctgaaagtgatcaagagcccaaatcttgtgacaaaactcacacatctccaccgtgctcagcacctgaactcctgggtggaccgtcagtcttcctcttccccccaaaacccaaggacaccctcatgatctcccggacccctgaggtcacatgcgtggtggtggacgtgagccacgaagaccctgaggtcaagttcaactggtacgtggacggcgtggaggtgcataatgccaagacaaagccgcgggaggagcagtacaacagcacgtaccgtgtggtcagcgtcctcaccgtcctgcaccaggactggctgaatggcaaggagtacaagtgcaaggtctccaacaaagccctcccagcccccatcgagaaaaccatctccaaagccaaagggcagccccgagaaccacaggtgtacaccctgcccccatcccgggatgagctgaccaagaaccaggtcagcctgacctgcctggtcaaaggcttctatccaagcgacatcgccgtggagtgggagagcaatgggcagccggagaacaactacaagaccacgcctcccgtgctggactccgacggctccttcttcctctacagcaagctcaccgtggacaagagcaggtggcagcaggggaacgtcttctcatgctccgtgatgcatgaggctctgcacaaccactacacgcagaagagcctctccctgtctccgggtaaa

SEQ ID NO: 1236 - protein, 633 aa, Artificial Sequence
  Made in a lab
LPAQVAFTPYAPEPGSTCRLREYYDQTAQMCCSKCSPGQHAKVFCTKTSDTVCDSCEDSTYTQLWNWVPECLSCGSRCSSDQVETQACTREQNRICTCRPGWYCALSKQEGCRLCAPLRKCRPGFGVARPGTETSDVVCKPCAPGTFSNTTSSTDICRPHQICNVVAIPGNASMDAVCTSTSPTRSMAPGAVHLPQPVSTRSQHTQPTPEPSTAPSTSFLLPMGPSPPAEGSTGDTGEPKSSDKTHTCPPCPAPEAAGAPSVFLFPPKPKDTLMISRTPEVTCVVVDVSHEDPEVKFNWYVDGVEVHNAKTKPREEQYNSTYRVVSVLTVLHQDWLNGKAYACAVSNKALPAPIEKTISKAKGQPREPQVYTLPPSRDELTKNQVSLTCLVKGFYPSDIAVEWESNGQPENNYKTTPPVLDSDGSFFLYSKLTVDKSRWQQGNVFSCSVMHEALHNHYTQKSLSLSPGQRHNNSSLNTGTQMAGHSPNSTIPPHVQKSVNNDMIVTDNNGAVKFPQLCKFCDVRFSTCDNQKSCMSNCSITSICEKPQEVCVAVWRKNDENITLETVCHDPKLPYHDFILEDAASPKCIMKEKKKPGETFFMCSCSSDECNDNIIFSEEYNTSNPDLLLVIFQ

SEQ ID NO: 1237 - protein, 450 aa, Artificial Sequence
  Made in a lab
EQAPGTAPCSRGSSWSADLDKCMDCASCRARPHSDFCLGCAAAPPAPFRLLWTGEPKSSDKTHTCPPCPAPEAAGAPSVFLFPPKPKDTLMISRTPEVTCVVVDVSHEDPEVKFNWYVDGVEVHNAKTKPREEQYNSTYRVVSVLTVLHQDWLNGKAYACAVSNKALPAPIEKTISKAKGQPREPQVYTLPPSRDELTKNQVSLTCLVKGFYPSDIAVEWESNGQPENNYKTTPPVLDSDGSFFLYSKLTVDKSRWQQGNVFSCSVMHEALHNHYTQKSLSLSPGQRHNNSSLNTGTQMAGHSPNSTIPPHVQKSVNNDMIVTDNNGAVKFPQLCKFCDVRFSTCDNQKSCMSNCSITSICEKPQEVCVAVWRKNDENITLETVCHDPKLPYHDFILEDAASPKCIMKEKKKPGETFFMCSCSSDECNDNIIFSEEYNTSNPDLLLVIFQ

SEQ ID NO: 1238 - DNA, 1968 bp, Artificial Sequence
  Made in a lab
atggattttcaagtgcagattttcagcttcctgctaatcagtgcttcagtcataatgtcgcgaggattgcccgcccaggtggcatttacaccctacgccccggagcccgggagcacatgccggctcagagaatactatgaccagacagctcagatgtgctgcagcaaatgctcgccgggccaacatgcaaaagtcttctgtaccaagacctcggacaccgtgtgtgactcctgtgaggacagcacatacacccagctctggaactgggttcccgagtgcttgagctgtggctcccgctgtagctctgaccaggtggaaactcaagcctgcactcgggaacagaaccgcatctgcacctgcaggcccggctggtactgcgcgctgagcaagcaggaggggtgccggctgtgcgcgccgctgcgcaagtgccgcccgggcttcggcgtggccagaccaggaactgaaacatcagacgtggtgtgcaagccctgtgccccggggacgttctccaacacgacttcatccacggatatttgcaggccccaccagatctgtaacgtggtggccatccctgggaatgcaagcatggatgcagtctgcacgtccacgtcccccacccggagtatggccccaggggcagtacacttaccccagccagtgtccacacgatcccaacacacgcagccaactccagaacccagcactgctccaagcacctccttcctgctcccaatgggccccagccccccagctgaagggagcactggcgacaccggtgagcccaaatcttctgacaaaactcacacatgcccaccgtgcccagcacctgaagccgcgggtgcaccgtcagtcttcctcttccccccaaaacccaaggacaccctcatgatctcccggacccctgaggtcacatgcgtggtggtggacgtgagccacgaagaccctgaggtcaagttcaactggtacgtggacggcgtggaggtgcataatgccaagacaaagccgcgggaggagcagtacaacagcacgtaccgtgtggtcagcgtcctcaccgtcctgcaccaggactggctgaatggcaaggcgtacgcgtgcgcggtctccaacaaagccctcccagcccccatcgagaaaaccatctccaaagccaaagggcagccccgagaaccacaggtgtacaccctgcccccatcccgggatgagctgaccaagaaccaggtcagcctgacctgcctggtcaaaggcttctatccaagcgacatcgccgtggagtgggagagcaatgggcagccggagaacaactacaagaccacgcctcccgtgctggactccgacggctccttcttcctctacagcaagctcaccgtggacaagagcaggtggcagcaggggaacgtcttctcatgctccgtgatgcatgaggctctgcacaaccactacacgcagaagagcctctccctgtctccgggtcagaggcacaacaattcttccctgaatacaggaactcagatggcaggtcattctccgaattctacgatcccaccgcacgttcagaagtcggttaataacgacatgatagtcactgacaacaacggtgcagtcaagtttccacaactgtgtaaattttgtgatgtgagattttccacctgtgacaaccagaaatcctgcatgagcaactgcagcatcacctccatctgtgagaagccacaggaagtctgtgtggctgtatggagaaagaatgacgagaacataacactagagacagtttgccatgaccccaagctcccctaccatgactttattctggaagatgctgcttctccaaagtgcattatgaaggaaaaaaaaaagcctggtgagactttcttcatgtgttcctgtagctctgatgagtgcaatgacaacatcatcttctcagaagaatataacaccagcaatcctgacttgttgctagtcatatttcaatga

SEQ ID NO: 1239 - DNA, 1416 bp, Artificial Sequence
  Made in a lab
atggattttcaagtgcagattttcagcttcctgctaatcagtgcttcagtcataatgtcgcgaggagagcaagcgccaggcaccgccccctgctcccgcggcagctcctggagcgcggacctggacaagtgcatggactgcgcgtcttgcagggcgcgaccgcacagcgacttctgcctgggctgcgctgcagcacctcctgcccccttccggctgctttggaccggtgagcccaaatcttctgacaaaactcacacatgcccaccgtgcccagcacctgaagccgcgggtgcaccgtcagtcttcctcttccccccaaaacccaaggacaccctcatgatctcccggacccctgaggtcacatgcgtggtggtggacgtgagccacgaagaccctgaggtcaagttcaactggtacgtggacggcgtggaggtgcataatgccaagacaaagccgcgggaggagcagtacaacagcacgtaccgtgtggtcagcgtcctcaccgtcctgcaccaggactggctgaatggcaaggcgtacgcgtgcgcggtctccaacaaagccctcccagcccccatcgagaaaaccatctccaaagccaaagggcagccccgagaaccacaggtgtacaccctgcccccatcccgggatgagctgaccaagaaccaggtcagcctgacctgcctggtcaaaggcttctatccaagcgacatcgccgtggagtgggagagcaatgggcagccggagaacaactacaagaccacgcctcccgtgctggactccgacggctccttcttcctctacagcaagctcaccgtggacaagagccggtggcagcaggggaacgtcttctcatgctccgtgatgcatgaggctctgcacaaccactacacgcagaagagcctctccctgtctccgggtcagaggcacaacaattcttccctgaatacaggaactcagatggcaggtcattctccgaattctacgatcccaccgcacgttcagaagtcggttaataacgacatgatagtcactgacaacaacggtgcagtcaagtttccacaactgtgtaaattttgtgatgtgagattttccacctgtgacaaccagaaatcctgcatgagcaactgcagcatcacctccatctgtgagaagccacaggaagtctgtgtggctgtatggagaaagaatgacgagaacataacactagagacagtttgccatgaccccaagctcccctaccatgactttattctggaagatgctgcttctccaaagtgcattatgaaggaaaaaaaaaagcctggtgagactttcttcatgtgttcctgtagctctgatgagtgcaatgacaacatcatcttctcagaagaatataacaccagcaatcctgacttgttgctagtcatatttcaa

SEQ ID NO: 1240 - protein, 10 aa, Human
EPKSCDKTHT

SEQ ID NO: 1241 - protein, 7 aa, Human
ERKCCVE

SEQ ID NO: 1242 - protein, 12 aa, Human
ELKTPLGDTTHT

SEQ ID NO: 1243 - protein, 10 aa, Human
EPKSCDTPPP

SEQ ID NO: 1244 - protein, 7 aa, Human
ESKYGPP

SEQ ID NO: 1245 - protein, 5 aa, Human
CPPCP

SEQ ID NO: 1246 - protein, 5 aa, Human
CPRCP

SEQ ID NO: 1247 - protein, 5 aa, Human
CPSCP

SEQ ID NO: 1248 - protein, 17 aa, Human
ELKTPLGDTTHTCPRCP

SEQ ID NO: 1249 - protein, 15 aa, Human
EPKSCDTPPPCPRCP

SEQ ID NO: 1250 - protein, 34 aa, Human
ESPKAQASSVPTAQPQAEGSLAKATTAPATTRNT

SEQ ID NO: 1251 - protein, 24 aa, Human
GRGGEEKKKEKEKEEQEERETKTP

SEQ ID NO: 1252 - protein, 19 aa, Human
VPSTPPTPSPSTPPTPSPS

SEQ ID NO: 1253 - protein, 6 aa, Human
VPPPPP

SEQ ID NO: 1254 - protein, 107 aa, Human
VCSRDFTPPTVKILQSSSDGGGHFPPTIQLLCLVSGYTPGTINITWLEDGQVMDVDLSTASTTQEGELASTQSELTLSQKHWLSDRTYTCQVTYQGHTFEDSTKKCA

SEQ ID NO: 1255 - protein, 112 aa, Human
VIAELPPKVSVFVPPRDGFFGNPRKSKLICQATGFSPRQIQVSWLREGKQVGSGVTTDQVQAEAKESGPTTYKVTSTLTIKESDWLGQSMFTCRVDHRGLTFQQNASSMCVP

1. A multi-specific fusion protein comprising a structure from amino terminus to carboxy terminus selected from the group consisting of:
(a) BD-ID-ED;
(b) ED-ID-BD; and
(c) ED1-ID-ED2
wherein:
ED is a TGFβ antagonist and ED1 and ED2 are different antagonists wherein ED1 or ED2 is a TGFβ antagonist;
ID is an intervening domain; and
BD is a binding domain of a TNF antagonist, an IL6 antagonist, an IL10 antagonist, a VEGF antagonist, an HGF antagonist, an IGF antagonist, or a GITR agonist.

2. The multi-specific fusion protein of claim 1, wherein the BD is an immunoglobulin variable binding domain.

3. The multi-specific fusion protein of claim 1, wherein the ED is a receptor ligand binding domain.

4. The multi-specific fusion protein of claim 1, wherein the intervening domain has the following structure:
-L1-CH2CH3-,
wherein:
L1 is an immunoglobulin hinge linker, and
—CH2CH3- is the CH2CH3 region of an IgG1 Fc domain.

5. The multi-specific fusion protein of claim 1, wherein the BD is connected to the intervening domain by a first linker and the ED is connected to the intervening domain by a second linker and wherein the first and second linkers are the same or different.

6. The multi-specific fusion protein of claim 5, wherein the first and second linkers are selected from the group consisting of SEQ ID NO:497-604 and 1223-122.

7. The multi-specific fusion protein of claim 1, comprising an amino acid sequence which is selected from the group consisting of SEQ ID NOS:735-742.

8. A composition comprising the multi-specific fusion protein of claim and a pharmaceutically acceptable carrier, diluent, or excipient.

9. The composition of claim 8 wherein the multi-specific fusion protein exists as a dimer or a multimer in the composition.

10. A polynucleotide encoding the multi-specific fusion protein of claim 1.

11. An expression vector comprising the polynucleotide according to claim 10, which is operably linked to an expression control sequence.

12. A host cell comprising the expression vector according to claim 11.

13. A method for treating a subject with a malignant condition comprising administering to a subject in need thereof a therapeutically effective amount of the multi-specific fusion protein of claim 1.

14. The method of claim 13 wherein the malignant condition is selected from the group consisting of breast cancer, renal cell carcinoma, melanoma and prostate cancer.

15. The multi-specific fusion protein of claim 4, wherein said immunoglobulin hinge linker is an IgG1 hinge having the first cysteine substituted with a different amino acid.

16. The multi-specific fusion protein of claim 4, wherein said CH2CH3 region of an IgG1 Fc domain is mutated to eliminate FcγRI-III interaction while retaining FcRn interaction.

17. The multi-specific fusion protein of claim 6, wherein the first linker is SEQ ID NO: 576 and the second linker is SEQ ID NO: 1223.

18. A method of producing a multi-specific fusion protein comprising culturing the host cell of claim 12 in a medium and expressing the protein.
